(19) United States
(12) Patent Application Publication
(10) Pub. No.: US 2025/0034558 A1
(43) Pub. Date: Jan. 30, 2025

(54) COMPOSITIONS AND METHODS FOR TARGETING, EDITING OR MODIFYING HUMAN GENES

(71) Applicants: Artisan Development Labs, Inc., Boulder, CO (US); DOMINGUES PEREIRA, Sara Isabel, Boulder, CO (US)

(72) Inventors: Andrea BARGHETTI, Copenhagen (DK); Roland BAUMGARTNER, Angern an der March (AT); Tanya WARNECKE, Boulder, CO (US); Sara Isabel DOMINGUES PEREIRA, Copenhagen (DK)

(21) Appl. No.: 18/571,700

(22) PCT Filed: Jun. 20, 2022
(86) PCT No.: PCT/US2022/034186

§ 371 Date: Dec. 18, 2023

Related U.S. Application Data
(60) Provisional application No. 63/286,814, filed on Dec. 7, 2021.
(60) Provisional application No. 63/212,189, filed on Jun. 18, 2021.

(51) Int. Cl. C12N 15/11; C12N 9/22; C12N 15/90

(52) U.S. Cl. CPC C12N 15/11; C12N 9/22; C12N 15/907; C12N 2310/20

(57) ABSTRACT

The present invention relates to engineered Clustered Regularly Interspaced Short Palindromic Repeats (CRISPR) systems and corresponding guide RNAs that target specific nucleotide sequences at certain gene loci in the human genome. Also provided are methods of targeting, editing, and/or modifying of the human genes using the engineered CRISPR systems, and compositions and cells comprising the engineered CRISPR systems.

[0001] This application claims the benefit of U.S. Provisional Application Nos. 63/212,189 filed Jun. 18, 2021, and 63/286,814, filed Dec. 7, 2021, which applications are incorporated herein by reference.

### BACKGROUND OF THE INVENTION

[0002] Recent advances have been made in precise genome targeting technologies. For example, specific loci in genomic DNA can be targeted, edited, or otherwise modified by designer meganucleases, zinc finger nucleases, or transcription activator-like effectors (TALEs). Furthermore, the CRISPR-Cas systems of bacterial and archaeal adaptive immunity have been adapted for precise targeting of genomic DNA in eukaryotic cells. Compared to the earlier generations of genome editing tools, the CRISPR-Cas systems are easy to set up, scalable, and amenable to targeting multiple positions within the eukaryotic genome, thereby providing a major resource for new applications in genome engineering.

[0003] Two distinct classes of CRISPR-Cas systems have been identified. Class 1 CRISPR-Cas systems utilize multi-protein effector complexes, whereas class 2 CRISPR-Cas systems utilize single-protein effectors (see, Makarova et al. (2017) CELL, 168: 328). Among the three types of class 2 CRISPR-Cas systems, type II and type V systems typically target DNA and type VI systems typically target RNA (id.). Naturally occurring type II effector complexes consist of Cas9, CRISPR RNA (crRNA), and trans-activating CRISPR RNA (tracrRNA), but the crRNA and tracrRNA can be fused as a single guide RNA in an engineered system for simplicity (see, Wang et al. (2016) ANNU. REV. BIOCHEM., 85: 227). Certain naturally occurring type V systems, such as type V-A, type V-C, and type V-D systems, do not require tracrRNA and use crRNA alone as the guide for cleavage of target DNA (see, Zetsche et al. (2015) CELL, 163: 759; Makarova et al. (2017) CELL, 168: 328).

[0004] The CRISPR-Cas systems have been engineered for various purposes, such as genomic DNA cleavage, base editing, epigenome editing, and genomic imaging (see, e.g., Wang et al. (2016) ANNU. REV. BIOCHEM., 85: 227 and Rees et al. (2018) NAT. REV. GENET., 19: 770). Although significant developments have been made, there remains a need for new and useful CRISPR-Cas systems as powerful genome targeting tools.

### SUMMARY OF THE INVENTION

[0005] The present invention is based, in part, upon the development of engineered CRISPR-Cas systems (e.g., type V-A CRISPR-Cas systems) that can be used to target, edit, or otherwise modify specific target nucleotide sequences in human APLNR, BBS1, CALR, CD247, CD3D, CD38, CD3E, CD3G, CD40LG, CD52, CD58, COL17A1, CSF2, DEFB134, ERAP1, ERAP2, IFNGR1, IFNGR2, JAK1, JAK2, mir-101-2, MLANA, NLRC5 PSMB5, PSMB8, PSMB9, PTCD2, RFX5, RFXANK, RFXAP, RPL23, SOX10, SRP54, STAT1, Tap1, TAP2, TAPBP, TRBC1, TRBC1_2 (or TRBC1+2), TRBC2, or TWF1 gene. In particular, guide nucleic acids, such as single guide nucleic acids and dual guide nucleic acids, can be designed to hybridize with the selected target nucleotide sequence and activate a Cas nuclease to edit the human genes. CRISPR-Cas systems comprising such guide nucleic acids are also useful for targeting or modifying the human genes.

[0006] A CRISPR-Cas system generally comprises a Cas protein and one or more guide nucleic acids (e.g., RNAs). The Cas protein can be directed to a specific location in a double-stranded DNA target by recognizing a protospacer adjacent motif (PAM) in the non-target strand of the DNA, and the one or more guide nucleic acids can be directed to a specific location by hybridizing with a target nucleotide sequence in the target strand of the DNA. Both PAM recognition and target nucleotide sequence hybridization are required for stable binding of a CRISPR-Cas complex to the DNA target and, if the Cas protein has an effector function (e.g., nuclease activity), activation of the effector function. As a result, when creating a CRISPR-Cas system, a guide nucleic acid can be designed to comprise a nucleotide sequence called spacer sequence that hybridizes with a target nucleotide sequence, where target nucleotide sequence is located adjacent to a PAM in an orientation operable with the Cas protein. It has been observed that not all CRISPR-Cas systems designed by these criteria are equally effective. The present invention identifies target nucleotide sequences in particular human genes that can be efficiently edited, and provides CRISPR-Cas systems directed to these target nucleotide sequences.

[0007] Accordingly, in one aspect, the present invention provides a guide nucleic acid comprising a targeter stem sequence and a spacer sequence, wherein the spacer sequence comprises a nucleotide sequence listed in Table 1, 2, 3, 4, 5, 6, 7, 8, or 9.

[0008] In certain embodiments, the targeter stem sequence comprises a nucleotide sequence of GUAGA. In certain embodiments, the targeter stem sequence is 5′ to the spacer sequence, optionally wherein the targeter stem sequence is linked to the spacer sequence by a linker consisting of 1, 2, 3, 4, or 5 nucleotides.

[0009] In certain embodiments, the guide nucleic acid is capable of activating a CRISPR Associated (Cas) nuclease in the absence of a tracrRNA (e.g., the guide nucleic acid being a single guide nucleic acid). In certain embodiments, the guide nucleic acid comprises from 5′ to 3′ a modulator stem sequence, a loop sequence, a targeter stem sequence, and the spacer sequence.

[0010] In certain embodiments, the guide nucleic acid is a targeter nucleic acid that, in combination with a modulator nucleic acid, is capable of activating a Cas nuclease. In certain embodiments, the guide nucleic acid comprises from 5′ to 3′ a targeter stem sequence and the spacer sequence.

[0011] In certain embodiments, the Cas nuclease is a type V Cas nuclease. In certain embodiments, the Cas nuclease is a type V-A Cas nuclease. In certain embodiments, the Cas nuclease comprises an amino acid sequence at least 80% identical to SEQ ID NO: 1. In certain embodiments, the Cas nuclease is Cpf1. In certain embodiments, the Cas nuclease recognizes a protospacer adjacent motif (PAM) consisting of the nucleotide sequence of TTTN or CTTN.

[0012] In certain embodiments, the guide nucleic acid comprises a ribonucleic acid (RNA). In certain embodiments, the guide nucleic acid comprises a modified RNA. In certain embodiments, the guide nucleic acid comprises a combination of RNA and DNA. In certain embodiments, the guide nucleic acid comprises a chemical modification. In certain embodiments, the chemical modification is present in one or more nucleotides at the 5′ end of the guide nucleic acid. In certain embodiments, the chemical modification is present in one or more nucleotides at the 3′ end of the guide nucleic acid. In certain embodiments, the chemical modification is selected from the group consisting of 2′-O-methyl, 2′-fluoro, 2′-O-methoxyethyl, phosphorothioate, phosphorodithioate, pseudouridine, and any combinations thereof.

[0013] The present invention also provides an engineered, non-naturally occurring system comprising a guide nucleic acid (e.g., a single guide nucleic acid) disclosed herein. In certain embodiments, the engineered, non-naturally occurring system further comprising the Cas nuclease. In certain embodiments, the guide nucleic acid and the Cas nuclease are present in a ribonucleoprotein (RNP) complex.

[0014] The present invention also provides an engineered, non-naturally occurring system comprising the guide nucleic acid (e.g., targeter nucleic acid) disclosed herein, wherein the engineered, non-naturally occurring system further comprises the modulator nucleic acid. In certain embodiments, the engineered, non-naturally occurring system, further comprises the Cas nuclease. In certain embodiments, the guide nucleic acid, the modulator nucleic acid, and the Cas nuclease are present in an RNP complex.

[0015] In certain embodiments of the engineered, non-naturally occurring system, the spacer sequence comprises a nucleotide sequence selected from the group consisting of SEQ ID NOs: 201-253, wherein the spacer sequence is capable of hybridizing with the human CSF2 gene. In certain embodiments, when the system is delivered into a population of human cells ex vivo, the genomic sequence at the CSF2 gene locus is edited in at least 1.5% of the cells, or at least 5, 10, 15, 20, 25, 30, 40, 50, 60, 70, 80, 90, or 95% of the cells.

[0016] In certain embodiments of the engineered, non-naturally occurring system, the spacer sequence comprises a nucleotide sequence selected from the group consisting of SEQ ID NOs: 254-313, wherein the spacer sequence is capable of hybridizing with the human CD40LG gene. In certain embodiments, when the system is delivered into a population of human cells ex vivo, the genomic sequence at the CD40LG gene locus is edited in at least 1.5% of the cells, or at least 5, 10, 15, 20, 25, 30, 40, 50, 60, 70, 80, 90, or 95% of the cells.

[0017] In certain embodiments of the engineered, non-naturally occurring system, the spacer sequence comprises a nucleotide sequence selected from the group consisting of SEQ ID NOs: 314-319 and 329-332, wherein the spacer sequence is capable of hybridizing with the human TRBC1 gene. In certain embodiments, when the system is delivered into a population of human cells ex vivo, the genomic sequence at the TRBC1 gene locus is edited in at least 1.5% of the cells, or at least 5, 10, 15, 20, 25, 30, 40, 50, 60, 70, 80, 90, or 95% of the cells.

[0018] In certain embodiments of the engineered, non-naturally occurring system, the spacer sequence comprises a nucleotide sequence selected from the group consisting of SEQ ID NOs: 320-328 and 329-332, wherein the spacer sequence is capable of hybridizing with the human TRBC2 gene. In certain embodiments, when the system is delivered into a population of human cells ex vivo, the genomic sequence at the TRBC2 gene locus is edited in at least 1.5% of the cells, or at least 5, 10, 15, 20, 25, 30, 40, 50, 60, 70, 80, 90, or 95% of the cells.

[0019] In certain embodiments of the engineered, non-naturally occurring system, the spacer sequence comprises a nucleotide sequence selected from the group consisting of SEQ ID NOs: 329-332, wherein the spacer sequence is capable of hybridizing with both the human TRBC1 gene and the human TRBC2 gene (TRBC1_2 or TRBC1+2). In certain embodiments, when the system is delivered into a population of human cells ex vivo, the genomic sequence at both the human TRBC1 gene and the human TRBC2 gene locus is edited in at least 1.5% of the cells, or at least 5, 10, 15, 20, 25, 30, 40, 50, 60, 70, 80, 90, or 95% of the cells.

[0020] In certain embodiments of the engineered, non-naturally occurring system, the spacer sequence comprises a nucleotide sequence selected from the group consisting of SEQ ID NOs: 333-374, wherein the spacer sequence is capable of hybridizing with the human CD3E gene. In certain embodiments, when the system is delivered into a population of human cells ex vivo, the genomic sequence at the CD3E gene locus is edited in at least 1.5% of the cells, or at least 5, 10, 15, 20, 25, 30, 40, 50, 60, 70, 80, 90, or 95% of the cells.

[0021] In certain embodiments of the engineered, non-naturally occurring system, the spacer sequence comprises a nucleotide sequence selected from the group consisting of SEQ ID NOs: 375-411, wherein the spacer sequence is capable of hybridizing with the human CD38 gene. In certain embodiments, when the system is delivered into a population of human cells ex vivo, the genomic sequence at the CD38 gene locus is edited in at least 1.5% of the cells, or at least 5, 10, 15, 20, 25, 30, 40, 50, 60, 70, 80, 90, or 95% of the cells.

[0022] In certain embodiments of the engineered, non-naturally occurring system, genomic mutations are detected in no more than 2% of the cells at any off-target loci by CIRCLE-Seq. In certain embodiments, genomic mutations are detected in no more than 1% of the cells at any off-target loci by CIRCLE-Seq.

[0023] In another aspect, the present invention provides a human cell comprising an engineered, non-naturally occurring system disclosed herein.

[0024] In another aspect, the present invention provides a composition comprising a guide nucleic acid, engineered, non-naturally occurring system, or human cell disclosed herein.

[0025] In another aspect, the present invention provides a method of cleaving a target DNA comprising the sequence of a preselected target gene or a portion thereof, the method comprising contacting the target DNA with an engineered, non-naturally occurring system disclosed herein, thereby resulting in cleavage of the target DNA. In certain embodiments, the contacting occurs in vitro. In certain embodiments, the contacting occurs in a cell ex vivo. In certain embodiments, the target DNA is genomic DNA of the cell.

[0026] In another aspect, the present invention provides a method of editing human genomic sequence at a preselected target gene locus, the method comprising delivering an engineered, non-naturally occurring system disclosed herein into a human cell, thereby resulting in editing of the genomic sequence at the target gene locus in the human cell. In certain embodiments, the cell is an immune cell. In certain embodiments, the immune cell is a T lymphocyte.

[0027] In certain embodiments, the method of editing human genomic sequence at a preselected target gene locus comprises delivering an engineered, non-naturally occurring system disclosed herein into a population of human cells, thereby resulting in editing of the genomic sequence at the target gene locus in at least a portion of the human cells. In certain embodiments, the population of human cells comprises human immune cells. In certain embodiments, the population of human cells is an isolated population of human immune cells. In certain embodiments, the immune cells are T lymphocytes.

[0028] In certain embodiments of the method of editing human genomic sequence at a preselected target gene locus, the engineered, non-naturally occurring system is delivered into the cell(s) as a pre-formed RNP complex. In certain embodiments, the pre-formed RNP complex is delivered into the cell(s) by electroporation.

[0029] In certain embodiments, the target gene is human CSF2 gene, wherein the spacer sequence comprises a nucleotide sequence selected from the group consisting of SEQ ID NOs: 201-253. In certain embodiments, the genomic sequence at the CSF2 gene locus is edited in at least 1.5% of the human cells, or at least 5, 10, 15, 20, 25, 30, 40, 50, 60, 70, 80, 90, or 95% of the cells.

[0030] In certain embodiments, the target gene is human CD40LG gene, wherein the spacer sequence comprises a nucleotide sequence selected from the group consisting of SEQ ID NOs: 254-313. In certain embodiments, the genomic sequence at the CD40LG gene locus is edited in at least 1.5% of the human cells, or at least 5, 10, 15, 20, 25, 30, 40, 50, 60, 70, 80, 90, or 95% of the cells.

[0031] In certain embodiments, the target gene is human TRBC1 gene, wherein the spacer sequence comprises a nucleotide sequence selected from the group consisting of SEQ ID NOs: 314-319 and 329-332. In certain embodiments, the genomic sequence at the TRBC1 gene locus is edited in at least 1.5% of the human cells, or at least 5, 10, 15, 20, 25, 30, 40, 50, 60, 70, 80, 90, or 95% of the cells.

[0032] In certain embodiments, the target gene is human TRBC2 gene, wherein the spacer sequence comprises a nucleotide sequence selected from the group consisting of SEQ ID NOs: 320-328 and 329-332. In certain embodiments, the genomic sequence at the TRBC2 gene locus is edited in at least 1.5% of the human cells, or at least 5, 10, 15, 20, 25, 30, 40, 50, 60, 70, 80, 90, or 95% of the cells.

[0033] In certain embodiments, the target gene is both the human TRBC1 gene and the human TRBC2 gene, wherein the spacer sequence comprises a nucleotide sequence selected from the group consisting of SEQ ID NOs: 329-332. In certain embodiments, the genomic sequence at both the human TRBC1 gene and the human TRBC2 gene locus is edited in at least 1.5% of the human cells, or at least 5, 10, 15, 20, 25, 30, 40, 50, 60, 70, 80, 90, or 95% of the cells.

[0034] In certain embodiments, the target gene is human CD3E gene, wherein the spacer sequence comprises a nucleotide sequence selected from the group consisting of SEQ ID NOs: 333-374. In certain embodiments, the genomic sequence at the CD3E gene locus is edited in at least 1.5% of the human cells, or at least 5, 10, 15, 20, 25, 30, 40, 50, 60, 70, 80, 90, or 95% of the cells.

[0035] In certain embodiments, the target gene is human CD38 gene, wherein the spacer sequence comprises a nucleotide sequence selected from the group consisting of SEQ ID NOs: 375-411. In certain embodiments, the genomic sequence at the CD38 gene locus is edited in at least 1.5% of the human cells, or at least 5, 10, 15, 20, 25, 30, 40, 50, 60, 70, 80, 90, or 95% of the cells.

[0036] In certain embodiments, genomic mutations are detected in no more than 2% of the cells at any off-target loci by CIRCLE-Seq. In certain embodiments, genomic mutations are detected in no more than 1% of the cells at any off-target loci by CIRCLE-Seq.

### INCORPORATION BY REFERENCE

[0037] All publications, patents, and patent applications mentioned in this specification are herein incorporated by reference to the same extent as if each individual publication, patent, or patent application was specifically and individually indicated to be incorporated by reference.

### BRIEF DESCRIPTION OF THE DRAWINGS

[0038] FIG. 1A is a schematic representation showing the structure of an exemplary single guide type V-A CRISPR system. FIG. 1B is a schematic representation showing the structure of an exemplary dual guide type V-A CRISPR system.

[0039] FIGS. 2A-C are a series of schematic representation showing incorporation of a protecting group (e.g., a protective nucleotide sequence or a chemical modification) (FIG. 2A), a donor template-recruiting sequence (FIG. 2B), and an editing enhancer (FIG. 2C) into a type V-A CRISPR-Cas system. These additional elements are shown in the context of a dual guide type V-A CRISPR system, but it is understood that they can also be present in other CRISPR systems, including a single guide type V-A CRISPR system, a single guide type II CRISPR system, or a dual guide type II CRISPR system.

[0040] FIG. 3A shows the knockout efficiency of single guide RNAs targeted human CD38 in pan-T cells as measured by the percentage of cells having one or more insertion or deletion at the target site (% indel).

[0041] FIG. 3B shows the knockout efficiency of single guide RNAs targeting human CD38 in pan-T cells as measured by flow cytometry assessing the percent of CD38 negative cells in a population.

[0042] FIGS. 4 A-F show the knockout efficiency of single guide RNAs targeting human APLNR, BBS1, CALR, CD247, CD3G, CD52, CD58, COL17A1, DEFB134, ERAP1, ERAP2, IFNGR1, IFNGR2, JAK1, JAK2, mir-101-2, MLANA, PSMB5, PSMB8, PSMB9, PTCD2, RFX5, RFXANK, RFXAP, RPL23, SOX10, SRP54, STAT1, Tap1, TAP2, TAPBP, and TWF1 genes in pan-T cells as measured by the percentage of cells having one or more insertion or deletion at the target site (% indel).

[0043] FIG. 5 shows the knockout efficiency of single guide RNAs targeting human CD3D (panel A) and NLRC5 (panel B) genes in pan-T cells as measured by flow cytometry assessing the percent of HLA-I, HLA-II, and TCR negative cells in a population.

[0044] FIG. 6 shows percentage of DSG3 positive cells in a population, plotted for various treatment conditions.

[0045] FIG. 7 shows Day 7 expansion data for populations transfected under various treatment conditions.

### DETAILED DESCRIPTION OF THE INVENTION

[0046] I. Guide Nucleic Acids and Engineered, Non-Naturally Occurring CRISPR-Cas Systems
   [0047] A. Cas Proteins
   [0048] B. RNA Modifications
[0049] II. Methods of Targeting, Editing, and/or Modifying Genomic DNA
   [0050] A. Ribonucleoprotein (RNP) Delivery and “Cas RNA” Delivery
   [0051] B. CRISPR Expression Systems
   [0052] C. Donor Templates
   [0053] D. Efficiency and Specificity
   [0054] E. Multiplex Methods
[0055] III. Pharmaceutical Compositions
[0056] IV. Therapeutic Uses
[0057] V. Kits
[0058] VI. Embodiments
[0059] VII. Examples

[0060] The present invention is based, in part, upon the development of engineered CRISPR-Cas systems (e.g., type V-A CRISPR-Cas systems) that can be used to target, edit, or otherwise modify specific target nucleotide sequences in human APLNR, BBS1, CALR, CD247, CD3D, CD38, CD3E, CD3G, CD40LG, CD52, CD58, COL17A1, CSF2, DEFB134, ERAP1, ERAP2, IFNGR1, IFNGR2, JAK1, JAK2, mir-101-2, MLANA, NLRC5 PSMB5, PSMB8, PSMB9, PTCD2, RFX5, RFXANK, RFXAP, RPL23, SOX10, SRP54, STAT1, Tap1, TAP2, TAPBP, TRBC1, TRBC1_2 (or TRBC1+2), TRBC2, or TWF1 gene. In particular, guide nucleic acids, such as single guide nucleic acids and dual guide nucleic acids, can be designed to hybridize with the selected target nucleotide sequence and activate a Cas nuclease to edit the human genes. CRISPR-Cas systems comprising such guide nucleic acids are also useful for targeting or modifying the human genes.

[0061] A CRISPR-Cas system generally comprises a Cas protein and one or more guide nucleic acids (e.g., RNAs). The Cas protein can be directed to a specific location in a double-stranded DNA target by recognizing a protospacer adjacent motif (PAM) in the non-target strand of the DNA, and the one or more guide nucleic acids can be directed to a specific location by hybridizing with a target nucleotide sequence in the target strand of the DNA. Both PAM recognition and target nucleotide sequence hybridization are required for stable binding of a CRISPR-Cas complex to the DNA target and, if the Cas protein has an effector function (e.g., nuclease activity), activation of the effector function. As a result, when creating a CRISPR-Cas system, a guide nucleic acid can be designed to comprise a nucleotide sequence called spacer sequence that hybridizes with a target nucleotide sequence, where target nucleotide sequence is located adjacent to a PAM in an orientation operable with the Cas protein. It has been observed that not all CRISPR-Cas systems designed by these criteria are equally effective. The present invention identifies target nucleotide sequences in particular human genes that can be efficiently edited, and provides CRISPR-Cas systems directed to these target nucleotide sequences.

[0062] Naturally occurring Type V-A, type V-C, and type V-D CRISPR-Cas systems lack a tracrRNA and rely on a single crRNA to guide the CRISPR-Cas complex to the target DNA. Dual guide nucleic acids capable of activating type V-A, type V-C, or type V-D Cas nucleases have been developed, for example, by splitting the single crRNA into a targeter nucleic acid and a modulator nucleic acid. Naturally occurring type V-A Cas proteins comprise a RuvC-like nuclease domain but lack an HNH endonuclease domain, and recognize a 5′ T-rich PAM located immediately upstream from the target nucleotide sequence, the orientation determined using the non-target strand (i.e., the strand not hybridized with the spacer sequence) as the coordinate. The CRISPR-Cas systems cleave a double-stranded DNA to generate a staggered double-stranded break rather than a blunt end. The cleavage site is distant from the PAM site (e.g., separated by at least 10, 11, 12, 13, 14, or 15 nucleotides downstream from the PAM on the non-target strand and/or separated by at least 15, 16, 17, 18, or 19 nucleotides upstream from the sequence complementary to PAM on the target strand).

[0063] Naturally occurring type II CRISPR-Cas systems (e.g., CRISPR-Cas9 systems) generally comprise two guide nucleic acids, called crRNA and tracrRNA, which form a complex by nucleotide hybridization. Single guide nucleic acids capable of activating type II Cas nucleases have been developed, for example, by linking the crRNA and the tracrRNA (see, e.g., U.S. Patent Application Publication No. 2014/0242664 and U.S. Pat. No. 10,266,850). Naturally occurring type II Cas proteins comprise a RuvC-like nuclease domain and an HNH endonuclease domain, and recognize a 3′ G-rich PAM located immediately downstream from the target nucleotide sequence, the orientation determined using the non-target strand (i.e., the strand not hybridized with the spacer sequence) as the coordinate. The CRISPR-Cas systems cleave a double-stranded DNA to generate a blunt end. The cleavage site is generally 3-4 nucleotides upstream from the PAM on the non-target strand.

[0064] Elements in an exemplary single guide type V-A CRISPR-Cas system are shown in FIG. 1A. The single guide nucleic acid is also called a “crRNA” where it is present in the form of an RNA. It comprises, from 5′ to 3′, an optional 5′ sequence, e.g., a tail sequence, a modulator stem sequence, a loop, a targeter stem sequence complementary to the modulator stem sequence, and a spacer sequence that hybridizes with the target strand of the target DNA. Where a 5′ sequence, e.g., a tail sequence is present, the sequence including the 5′ sequence, e.g., a tail sequence and the modulator stem sequence is also called a “modulator sequence” herein. A fragment of the single guide nucleic acid from the optional 5′ sequence, e.g., a tail sequence to the targeter stem sequence, also called a “scaffold sequence” herein, bind the Cas protein. In addition, the PAM in the non-target strand of the target DNA binds the Cas protein.

[0065] Elements in an exemplary dual guide type V-A CRISPR-Cas system are shown in FIG. 1B. The first guide nucleic acid, called “modulator nucleic acid” herein, comprises, from 5′ to 3′, an optional 5′ sequence, e.g., a tail sequence and a modulator stem sequence. Where a 5′ sequence, e.g., a tail sequence, is present, the sequence including the 5′ sequence, e.g., a tail sequence and the modulator stem sequence is also called a “modulator sequence” herein. The second guide nucleic acid, called “targeter nucleic acid” herein, comprises, from 5′ to 3′, a targeter stem sequence complementary to the modulator stem sequence and a spacer sequence that hybridizes with the target strand of the target DNA. The duplex between the modulator stem sequence and the targeter stem sequence, plus the optional 5′ sequence, e.g., a tail sequence, constitute a structure that binds the Cas protein. In addition, the PAM in the non-target strand of the target DNA binds the Cas protein.

[0066] The terms “targeter stem sequence” and “modulator stem sequence,” as used herein, refer to a pair of nucleotide sequences in one or more guide nucleic acids that hybridize with each other. When a targeter stem sequence and a modulator stem sequence are contained in a single guide nucleic acid, the targeter stem sequence is proximal to a spacer sequence designed to hybridize with a target nucleotide sequence, and the modulator stem sequence is proximal to the targeter stem sequence. When a targeter stem sequence and a modulator stem sequence are in separate nucleic acids, the targeter stem sequence is in the same nucleic acid as a spacer sequence designed to hybridize with a target nucleotide sequence. In a CRISPR-Cas system that naturally includes separate crRNA and tracrRNA (e.g., a type II system), the duplex formed between the targeter stem sequence and the modulator stem sequence corresponds to the duplex formed between the crRNA and the tracrRNA. In a CRISPR-Cas system that naturally includes a single crRNA but no tracrRNA (e.g., a type V-A system), the duplex formed between the targeter stem sequence and the modulator stem sequence corresponds to the stem portion of a stem-loop structure in the scaffold sequence (also called direct repeat sequence) of the crRNA. It is understood that 100% complementarity is not required between the targeter stem sequence and the modulator stem sequence. In a type V-A CRISPR-Cas system, however, the targeter stem sequence is typically 100% complementary to the modulator stem sequence.

[0067] In certain embodiments wherein the target nucleic acid and the modulator nucleic acid comprise a single polynucleotide, a loop motif may exist between the 3′ stem sequence of the targeter nucleic acid and the 5′ stem sequence of the modulator nucleic acid, e.g., a stem loop. In certain embodiments, the loop motif is between 1-11, 2-11, 3-11, 4-11, 5-11, 3-10, 3-9, 3-8, 3-7, 3-6, 1-11, 2-10, 3-9, 4-8, 5-7, 4-6, 1-7, 2-6, 3-5 nucleotides in length. In a preferred embodiment, the loop motif is between 3-5 nucleotides in length. In a separate preferred embodiment, the loop motif is four nucleotides in length. In certain embodiments, the loop motif is 5′-TCTT-3′ or 5′-TATT-3′.

[0068] The term “targeter nucleic acid,” as used herein in the context of a dual guide CRISPR-Cas system, can include a nucleic acid comprising (i) a spacer sequence designed to hybridize with a target nucleotide sequence; and (ii) a targeter stem sequence capable of hybridizing with an additional nucleic acid to form a complex, wherein the complex is capable of activating a Cas nuclease (e.g., a type II or type V-A Cas nuclease) under suitable conditions, and wherein the targeter nucleic acid alone, in the absence of the additional nucleic acid, is not capable of activating the Cas nuclease under the same conditions. The term “targeter nucleic acid,” as used herein in the context of a single guide nucleic acid CRISPR-Cas system, can include a nucleic acid comprising (i) a spacer sequence designed to hybridize with a target nucleotide sequence; and (ii) a targeter stem sequence capable of hybridizing with a complementary stem sequence in a modulator nucleic acid that is 5′ to the targeter nucleic acid in the single polynucleotide of the sgNA, wherein the sgNA is capable of activating a Cas nuclease (e.g., a type II or type V-A Cas nuclease).

[0069] The term “modulator nucleic acid,” as used herein in connection with a given targeter nucleic acid and its corresponding Cas nuclease, can include a nucleic acid capable of hybridizing with the targeter nucleic acid, to form an intra-polynucleotide hybridized portion in the case of a sgNA, and to form a complex in the case of a dual gNA, wherein the sgNA or complex, but not the modulator nucleic acid alone, is capable of activating the type Cas nuclease under suitable conditions.

[0070] The term “suitable conditions,” as used in connection with the definitions of “targeter nucleic acid” and “modulator nucleic acid,” refers to the conditions under which a naturally occurring CRISPR-Cas system is operative, such as in a prokaryotic cell, in a eukaryotic (e.g., mammalian or human) cell, or in an in vitro assay.

[0071] The features and uses of the guide nucleic acids and CRISPR-Cas systems are discussed in the following sections.

### I. GUIDE NUCLEIC ACIDS AND ENGINEERED, NON-NATURALLY OCCURRING CRISPR-CAS SYSTEMS

[0072] The present invention provides a guide nucleic acid comprising a targeter stem sequence and a spacer sequence, wherein the spacer sequence comprises a nucleotide sequence listed in Tables 1, 2, 3, 4, 5, 6, or 7, or a portion thereof sufficient to hybridize with the corresponding target gene listed in the table. In particular, Table 1 lists the guide nucleic acid, targeting human CSF2 gene, comprising a spacer sequence with SEQ ID NOs: 201-253. Table 2 lists the guide nucleic acid, targeting human CD40LG gene, comprising a spacer sequence with SEQ ID NOs: 254-313. Table 3 lists the guide nucleic acid, targeting human TRBC1 gene, comprising a spacer sequence with SEQ ID NOs: 314-319. Table 4 lists the guide nucleic acid, targeting human TRBC2 gene, comprising a spacer sequence with SEQ ID NOs: 320-328. Table 5 lists the guide nucleic acid, targeting both the human TRBC1 gene and the human TRBC2 gene (TRBC1_2), comprising a spacer sequence with SEQ ID NOs: 329-332. Table 6 lists the guide nucleic acid, targeting human CD3E gene, comprising a spacer sequence with SEQ ID NOs: 333-374. Table 7 lists the guide nucleic acid, targeting human CD38 gene, comprising a spacer sequence with SEQ ID NOs: 375-411. Table 8 lists the guide nucleic acid, targeting human APLNR, BBS1, CALR, CD247, CD3G, CD52, CD58, COL17A1, DEFB134, ERAP1, ERAP2, IFNGR1, IFNGR2, JAK1, JAK2, mir-101-2, MLANA, PSMB5, PSMB8, PSMB9, PTCD2, RFX5, RFXANK, RFXAP, RPL23, SOX10, SRP54, STAT1, Tap1, TAP2, TAPBP, and TWF1 genes, comprising SEQ ID NOs: 412-715. Table 9 lists the guide nucleic acid, targeting human CD3D and NLRC5 genes, comprising a spacer sequence with SEQ ID NOs: 716-744.

[0073] In certain embodiments, a guide nucleic acid of the present invention is capable of hybridizing with the genomic locus of the corresponding target gene in the human genome. In certain embodiments, a guide nucleic acid of the present invention, alone of in combination with a modulator nucleic acid, is capable of forming a nucleic acid-guided nuclease complex with a Cas protein. In certain embodiments, a guide nucleic acid of the present invention, alone or in combination with a modulator nucleic acid, is capable of directing a Cas protein to the genomic locus of the corresponding target gene in the human genome. In certain embodiments, a guide nucleic acid of the present invention, alone or in combination with a modulator nucleic acid, is capable of directing a Cas nuclease to the genomic locus of the corresponding target gene in the human genome, thereby resulting in cleavage of the genomic DNA at the genomic locus.

TABLE 1
Selected Spacer Sequences Targeting
Human CSF2 Genes

| | | SEQ |
|---|---|---|
| | | ID |
| crRNA | Spacer Sequence | NO |
| gCSF2_001 | TGAGATGACTTCTACTGTTTC | 201 |
| gCSF2_002 | CCTTTTCTACAGAATGAAACA | 202 |
| gCSF2_003 | CTTTTCTACAGAATGAAACAG | 203 |
| gCSF2_004 | CTACAGAATGAAACAGTAGAA | 204 |
| gCSF2_005 | TACAGAATGAAACAGTAGAAG | 205 |
| gCSF2_006 | CCACAGGAGCCGACCTGCCTA | 206 |
| gCSF2_007 | CACAGGAGCCGACCTGCCTAC | 207 |
| gCSF2_008 | ttatttttctttttttAAAGG | 208 |
| gCSF2_009 | tatttttctttttttAAAGGA | 209 |
| gCSF2_010 | atttttctttttttAAAGGAA | 210 |
| gCSF2_011 | tttttctttttttAAAGGAAA | 211 |
| gCSF2_012 | tctttttttAAAGGAAACTTC | 212 |
| gCSF2_013 | ctttttttAAAGGAAACTTCC | 213 |
| gCSF2_014 | tttttttAAAGGAAACTTCCT | 214 |
| gCSF2_015 | tttAAAGGAAACTTCCTGTGC | 215 |
| gCSF2_016 | ttAAAGGAAACTTCCTGTGCA | 216 |
| gCSF2_017 | tAAAGGAAACTTCCTGTGCAA | 217 |
| gCSF2_018 | AAAGGTGATAATCTGGGTTGC | 218 |
| gCSF2_019 | AAAGGAAACTTCCTGTGCAAC | 219 |
| gCSF2_020 | AAGGAAACTTCCTGTGCAACC | 220 |
| gCSF2_021 | AAACTTTCAAAGGTGATAATC | 221 |
| gCSF2_022 | AAAGTTTCAAAGAGAACCTGA | 222 |
| gCSF2_023 | AAAGAGAACCTGAAGGACTTT | 223 |
| gCSF2_024 | TGCTTGTCATCCCCTTTGACT | 224 |
| gCSF2_025 | ACTGCTGGGAGCCAGTCCAGG | 225 |
| gCSF2_026 | CCTAGGTGGTCAGGCTTGGGG | 226 |
| gCSF2_027 | TGGTCACCATTAATCATTTCC | 227 |
| gCSF2_028 | CTCTGTGTATTTAAGAGCTCT | 228 |
| gCSF2_029 | AGAGCTCTTTTGCCAGTGAGC | 229 |
| gCSF2_030 | ATTCTGTAGAAAAGGAAAATG | 230 |
| gCSF2_031 | ACCTCCAGGTAAGATGCTTCT | 231 |
| gCSF2_032 | CAGAAGCCCCTGCCCTGGGGT | 232 |
| gCSF2_033 | GATGGCACCACACAGGGTTGT | 233 |
| gCSF2_034 | TCTCCAGTCAGCTGGCTGCAG | 234 |
| gCSF2_035 | TCAGCTGAGCGGCCATGGGCA | 235 |
| gCSF2_036 | CCACCTGTCCCCTGGTGACTC | 236 |
| gCSF2_037 | GGGCGCTCACTGTGCCCCGAG | 237 |
| gCSF2_038 | AGGAACAACCCTTGCCCACCC | 238 |
| gCSF2_039 | CTGCTGCCCCCAGCCCCCAGG | 239 |
| gCSF2_040 | TGTGCCAACAGTTATGTAATG | 240 |
| gCSF2_041 | ATCCCAAGGAGTCAGAGCCAC | 241 |
| gCSF2_042 | CCCTCACCTCTGACCTCATTA | 242 |
| gCSF2_043 | CTTGGGTTTGCCCTCACCTCT | 243 |
| gCSF2_044 | CTCTGGCCCCACATGGGGTGC | 244 |
| gCSF2_045 | CTCCCTTCCCGCAGGAAGGAG | 245 |
| gCSF2_046 | TGGCCTTGACTCCACTCCTTC | 246 |
| gCSF2_047 | GTCCCAGGGCAGAGCAGGGCA | 247 |
| gCSF2_048 | ACTGCCCAGAAGGCCAACCTC | 248 |
| gCSF2_049 | TCTACTGCCTCTTAGAACTCA | 249 |
| gCSF2_050 | AAAGGAAACTTCCTGTGCAAt | 250 |
| gCSF2_051 | AAGGAAACTTCCTGTGCAAtC | 251 |
| gCSF2_052 | AAAGGTGATAgTCTGGaTTGC | 252 |
| gCSF2_053 | AAACTTTCAAAGGTGATAgTC | 253 |

TABLE 2
Selected Spacer Sequences Targeting
Human CD40LG Genes

| | | SEQ |
|---|---|---|
| | | ID |
| crRNA | Spacer Sequence | NO |
| gCD40LG_001 | GTTGTATGTTTCGATCATGCT | 254 |
| gCD40LG_002 | AACTTTAACACAGCATGATCG | 255 |
| gCD40LG_003 | ACACAGCATGATCGAAACATA | 256 |
| gCD40LG_004 | ATGCTGATGGGCAGTCCAGTG | 257 |
| gCD40LG_005 | CATGCTGATGGGCAGTCCAGT | 258 |
| gCD40LG_006 | TATGTATTTACTTACTGTTTT | 259 |
| gCD40LG_007 | ATGTATTTACTTACTGTTTTT | 260 |
| gCD40LG_008 | TGTATTTACTTACTGTTTTTC | 261 |
| gCD40LG_009 | CTTACTGTTTTTCTTATCACC | 262 |
| gCD40LG_010 | TCTTATCACCCAGATGATTGG | 263 |
| gCD40LG_011 | CTTATCACCCAGATGATTGGG | 264 |
| gCD40LG_012 | TTATCACCCAGATGATTGGGT | 265 |
| gCD40LG_013 | TGCTGTGTATCTTCATAGAAG | 266 |
| gCD40LG_014 | GCTGTGTATCTTCATAGAAGG | 267 |
| gCD40LG_015 | CTGTGTATCTTCATAGAAGGT | 268 |
| gCD40LG_016 | ATGAATACAAAATCTTCATGA | 269 |
| gCD40LG_017 | CATGAATACAAAATCTTCATG | 270 |
| gCD40LG_018 | TCCTGTGTTGCATCTCTGTAT | 271 |
| gCD40LG_019 | GTATTCATGAAAACGATACAG | 272 |
| gCD40LG_020 | TATTCATGAAAACGATACAGA | 273 |
| gCD40LG_021 | ATCTCCTCACAGTTCAGTAAG | 274 |
| gCD40LG_022 | AATCTCCTCACAGTTCAGTAA | 275 |
| gCD40LG_023 | CCAGTAATTAAGCTGCTTACC | 276 |
| gCD40LG_024 | ACCAGTAATTAAGCTGCTTAC | 277 |
| gCD40LG_025 | AAGGCTTTGTGAAGGTAAGCA | 278 |
| gCD40LG_026 | TTCGTCTCCTCTTTGTTTAAC | 279 |
| gCD40LG_027 | TTTCTTCGTCTCCTCTTTGTT | 280 |
| gCD40LG_028 | CTTTCTTCGTCTCCTCTTTGT | 281 |
| gCD40LG_029 | AGGATATAATGTTAAACAAAG | 282 |
| gCD40LG_030 | GGATATAATGTTAAACAAAGA | 283 |
| gCD40LG_031 | AAAGCTGTTTTCTTTCTTCGT | 284 |
| gCD40LG_032 | CATTTCAAAGCTGTTTTCTTT | 285 |
| gCD40LG_033 | GCATTTCAAAGCTGTTTTCTT | 286 |
| gCD40LG_034 | TGCATTTCAAAGCTGTTTTCT | 287 |
| gCD40LG_035 | AGGATTCTGATCACCTGAAAT | 288 |
| gCD40LG_036 | TGGTTCCATTTCAGGTGATCA | 289 |
| gCD40LG_037 | GGTTCCATTTCAGGTGATCAG | 290 |
| gCD40LG_038 | GTTCCATTTCAGGTGATCAGA | 291 |
| gCD40LG_039 | AGGTGATCAGAATCCTCAAAT | 292 |
| gCD40LG_040 | CTGCTGGCCTCACTTATGACA | 293 |
| gCD40LG_041 | AGCCCACTGTAACACTGTTAC | 294 |
| gCD40LG_042 | CAGCCCACTGTAACACTGTTA | 295 |
| gCD40LG_043 | TCAGCCCACTGTAACACTGTT | 296 |
| gCD40LG_044 | CCTTTCTTTGTAACAGTGTTA | 297 |
| gCD40LG_045 | TTTGTAACAGTGTTACAGTGG | 298 |
| gCD40LG_046 | TAACAGTGTTACAGTGGGCTG | 299 |
| gCD40LG_047 | CAGGGTTACCAAGTTGTTGCT | 300 |
| gCD40LG_048 | CCAGGGTTACCAAGTIGTTGC | 301 |
| gCD40LG_049 | CCATTTTCCAGGGTTACCAAG | 302 |
| gCD40LG_050 | ACGGTCAGCTGTTTCCCATTT | 303 |
| gCD40LG_051 | AACGGTCAGCTGTTTCCCATT | 304 |
| gCD40LG_052 | GGCAGAGGCTGGCTATAAATG | 305 |
| gCD40LG_053 | TAGCCAGCCTCTGCCTAAAGT | 306 |
| gCD40LG_054 | CAGCTCTGAGTAAGATTCTCT | 307 |
| gCD40LG_055 | GCGGAACTGTGGGTATTTGCA | 308 |
| gCD40LG_056 | AATTGCAACCAGGTGCTTCGG | 309 |
| gCD40LG_057 | TCAATGTGACTGATCCAAGCC | 310 |
| gCD40LG_058 | AGTAAGCCAAAGGACGTGAAG | 311 |
| gCD40LG_059 | GCTTACTCAAACTCTGAACAG | 312 |
| gCD40LG_060 | ACTGCTGGCCTCACTTATGAC | 313 |

TABLE 3
Selected Spacer Sequences Targeting
Human TRBC1 Genes

| crRNA | Spacer Sequence | SEQ ID NO |
|---|---|---|
| gTRBC1_001 | CAGAGGACCTGAACAAGGTGT | 314 |
| gTRBC1_002 | CCTCTCCCTGCTTTCTTTCAG | 315 |
| gTRBC1_003 | CTCTCCCTGCTTTCTTTCAGA | 316 |
| gTRBC1_004 | TTTCAGACTGTGGCTTTACCT | 317 |
| gTRBC1_005 | AGACTGTGGCTTTACCTCGGG | 318 |
| gTRBC1_006 | TCTTCTGCAGGTCAAGAGAAA | 319 |

TABLE 4
Selected Spacer Sequences Targeting
Human TRBC2 Genes

| crRNA | Spacer Sequence | SEQ ID NO |
|---|---|---|
| gTRBC2_001 | CAGAGGACCTGAAAAACGTGT | 320 |
| gTRBC2_002 | TCTTCCCCTGTTTTCTTTCAG | 321 |
| gTRBC2_003 | CTTCCCCTGTTTTCTTTCAGA | 322 |
| gTRBC2_004 | TTCCCCTGTTTTCTTTCAGAC | 323 |
| gTRBC2_005 | CTTTCAGACTGTGGCTTCACC | 324 |
| gTRBC2_006 | TTTCAGACTGTGGCTTCACCT | 325 |
| gTRBC2_007 | AGACTGTGGCTTCACCTCCGG | 326 |
| gTRBC2_008 | GAGCTAGCCTCTGGAATCCTT | 327 |
| gTRBC2_009 | GGAGCTAGCCTCTGGAATCCT | 328 |

TABLE 5
Selected Spacer Sequences Targeting
Human TRBC1_2 Genes

| CrRNA | Spacer Sequence | SEQ ID NO |
|---|---|---|
| gTRBC1_2_001 | GGTGTGGGAGATCTCTGCTTC | 329 |
| gTRBC1_2_002 | GGGTGTGGGAGATCTCTGCTT | 330 |
| gTRBC1_2_003 | AGCCATCAGAAGCAGAGATCT | 331 |
| gTRBC1_2_004 | GCCCTATCCTGGGTCCACTCG | 332 |

TABLE 6
Selected Spacer Sequences Targeting
Human CD3E Genes

| crRNA | Spacer Sequence | SEQ ID NO |
|---|---|---|
| gCD3E_1 | CACTCCATCCTACTCACCTGA | 333 |
| gCD3E_2 | tttttCTTATTTATTTTCTAG | 334 |
| gCD3E_3 | ttttCTTATTTATTTTCTAGT | 335 |
| gCD3E_4 | tttCTTATTTATTTTCTAGTT | 336 |
| gCD3E_5 | ttCTTATTTATTTTCTAGTTG | 337 |
| gCD3E_6 | tCTTATTTATTTTCTAGTTGG | 338 |
| gCD3E_7 | CTTATTTATTTTCTAGTTGGC | 339 |
| gCD3E_8 | TTATTTATTTTCTAGTTGGCG | 340 |
| gCD3E_9 | TTTTCTAGTTGGCGTTTGGGG | 341 |
| gCD3E_10 | CTAGTTGGCGTTTGGGGGCAA | 342 |
| gCD3E_11 | TAGTTGGCGTTTGGGGGCAAG | 343 |
| gCD3E_12 | CTTTTCAGGTAATGAAGAAAT | 344 |
| gCD3E_13 | CAGGTAATGAAGAAATGGGTA | 345 |
| gCD3E_14 | AGGTAATGAAGAAATGGGTAA | 346 |
| gCD3E_15 | CTTTTTTCATTTTCAGGTGGT | 347 |
| gCD3E_16 | TTCATTTTCAGGTGGTATTAC | 348 |
| gCD3E_17 | TCATTTTCAGGTGGTATTACA | 349 |
| gCD3E_18 | CATTTTCAGGTGGTATTACAC | 350 |
| gCD3E_19 | ATTTTCAGGTGGTATTACACA | 351 |
| gCD3E_20 | CAGGTGGTATTACACAGACAC | 352 |
| gCD3E_21 | AGGTGGTATTACACAGACACG | 353 |
| gCD3E_22 | CCTTCTTTCTCCCCAGCATAT | 354 |
| gCD3E_23 | TCCCCAGCATATAAAGTCTCC | 355 |
| gCD3E_24 | AGATCCAGGATACTGAGGGCA | 356 |
| gCD3E_25 | tcatTGTGTTGCCATAGTATT | 357 |
| gCD3E_26 | atcatTGTGTTGCCATAGTAT | 358 |
| gCD3E_27 | tatcatTGTGTTGCCATAGTA | 359 |
| gCD3E_28 | tcatcctcatcaccgcctatg | 360 |
| gCD3E_29 | atcatcctcatcaccgcctat | 361 |
| gCD3E_30 | tatcatcctcatcaccgccta | 362 |
| gCD3E_31 | CTCCAATTCTGAAAATTCCTT | 363 |
| gCD3E_32 | CAGAATTGGAGCAAAGTGGTT | 364 |
| gCD3E_33 | AGAATTGGAGCAAAGTGGTTA | 365 |
| gCD3E_34 | CTTCCTCTGGGGTAGCAGACA | 366 |
| gCD3E_35 | ATCTCTACCTGAGGGCAAGAG | 367 |
| gCD3E_36 | TCTCTACCTGAGGGCAAGAGG | 368 |
| gCD3E_37 | TATTCTTGCTCCAGTAGTAAA | 369 |
| gCD3E_38 | CTACTGGAGCAAGAATAGAAA | 370 |
| gCD3E_39 | CCTGCCGCCAGCACCCGCTCC | 371 |
| gCD3E_40 | CCCTCCTTCCTCCGCAGGACA | 372 |
| gCD3E_41 | TATCCCACGTTACCTCATAGT | 373 |
| gCD3E_42 | ACCCCCAGCCCATCCGGAAAG | 374 |

TABLE 7
Selected Spacer Sequences Targeting
Human CD38 Genes

| crRNA | Spacer Sequence | SEQ ID NO |
|---|---|---|
| gCD38_001 | TCCCCGGACACCGGGCTGAAC | 375 |
| gCD38_002 | AGTGTACTTGACGCATCGCGC | 376 |
| gCD38_003 | CCGAGACCGTCCTGGCGCGAT | 377 |
| gCD38_004 | GCAGTCTACATGTCTGAGATA | 378 |
| gCD38_005 | TGTGTTTTATCTCAGACATGT | 379 |
| gCD38_006 | TCTCAGACATGTAGACTGCCA | 380 |
| gCD38_007 | AAATAAATGCACCCTTGAAAG | 381 |
| gCD38_008 | AAGGGTGCATTTATTTCAAAA | 382 |
| gCD38_009 | TTTCAAAACATCCTTGCAACA | 383 |
| gCD38_010 | AAAACATCCTTGCAACATTAC | 384 |
| gCD38_011 | TTCTGCTCCAAAGAAGAATCT | 385 |
| gCD38_012 | TTCTTCCTTAGATTCTTCTTT | 386 |
| gCD38_013 | GAGCAGAATAAAAGATCTGGC | 387 |
| gCD38_014 | TACAAACTATGTCTTTTAGAA | 388 |
| gCD38_015 | TCCAGTCTGGGCAAGATTGAT | 389 |
| gCD38_016 | GAAATAAACTATCAATCTTGC | 390 |
| gCD38_017 | CAGAATACTGAAACAGGGTTG | 391 |
| gCD38_018 | AGTATTCTGGAAAACGGTTTC | 392 |
| gCD38_019 | ACTACTTGGTACTTACCCTGC | 393 |
| gCD38_020 | AGTTTGCAGAAGCTGCCTGTG | 394 |
| gCD38_021 | CAGAAGCTGCCTGTGATGTGG | 395 |
| gCD38_022 | CTGCGGGATCCATTGAGCATC | 396 |
| gCD38_023 | TCAAAGATTTTACTGCGGGAT | 397 |
| gCD38_024 | GGGTTCTTTGTTTCTTCTATT | 398 |
| gCD38_025 | TTTCTTCTATTTTAGCACTTT | 399 |
| gCD38_026 | TTCTATTTTAGCACTTTTGGG | 400 |
| gCD38_027 | GCACTTTTGGGAGTGTGGAAG | 401 |
| gCD38_028 | GGAGTGTGGAAGTCCATAATT | 402 |
| gCD38_029 | CAACCAGAGAAGGTTCAGACA | 403 |
| gCD38_030 | TGGTGGGATCCTGGCATAAGT | 404 |
| gCD38_031 | TTCCCCAGAGACTTATGCCAG | 405 |
| gCD38_032 | CTTATAATCGATTCCAGCTCT | 406 |
| gCD38_033 | CTTTTTTGCTTTCTTGTCATA | 407 |
| gCD38_034 | CTTTCTTGTCATAGACCTGAC | 408 |
| gCD38_035 | ACACACTGAAGAAACTTGTCA | 409 |
| gCD38_036 | TTGTCATAGACCTGACAAGTT | 410 |
| gCD38_037 | TTCAGTGTGTGAAAAATCCTG | 411 |

TABLE 8
Spacer Sequences Targeting Other Human Genes

| | | SEQ ID |
|---|---|---|
| CrRNA | Spacer Sequence | NO |
| gAPLNR_001 | ACAACTACTATGGGGCAGACA | 412 |
| gAPLNR_002 | CAGTCTGTGTACTCACACTCA | 413 |
| gAPLNR_003 | GGAGCAGCCGGGAGAAGAGGC | 414 |
| gAPLNR_004 | GGACCTTCTTCTGCAAGCTCA | 415 |
| gAPLNR_006 | TGGTGCCCTTCACCATCATGC | 416 |
| gAPLNR_007 | GGCGATGAAGAAGTAACAGGT | 417 |
| gAPLNR_008 | CCCTGTGCTGGATGCCCTACC | 418 |
| gAPLNR_009 | ACCTCTTCCTCATGAACATCT | 419 |
| gAPLNR_010 | GACCCCCGCTTCCGCCAGGCC | 420 |
| gAPLNR_011 | TCGTGCATCTGTTCTCCACCC | 421 |
| gBBS1_005 | CATGGGGATGGGGAATACAAG | 422 |
| gBBS1_007 | GGTCATCACCAGTGGTCCTTT | 423 |
| gBBS1_009 | GCCTGGTTCCAAAGGTCTTGT | 424 |
| gBBS1_015 | ACTTAGCTCCAGCTGCAGAAA | 425 |
| gBBS1_016 | CAAATGCCTCCATTTCACTTA | 426 |
| gBBS1_017 | TGCAGCTGGAGCTAAGTGAAA | 427 |
| gBBS1_018 | TAAACCAACACAAGTCCAACT | 428 |
| gBBS1_028 | CACTGTCCACTTCCCTAGGTG | 429 |
| gBBS1_032 | CGTGGATCAGACACTGCGAGA | 430 |
| gBBS1_033 | TCCACCCACCCTCTCCATAGG | 431 |
| gCALR_001 | GATTCGATCCAGCGGGAAGTC | 432 |
| gCALR_006 | CAGACAAGCCAGGATGCACGC | 433 |
| gCALR_011 | ACCGTGAACTGCACCACCAGC | 434 |
| gCALR_012 | CTAATAGTTTGGACCAGACAG | 435 |
| gCALR_013 | GACCAGACAGACATGCACGGA | 436 |
| gCALR_014 | CCACCACCCCCAGGCACACCT | 437 |
| gCALR_015 | CACACCTGTACACACTGATTG | 438 |
| gCALR_017 | AAGCATCAGGATCCTTTATCT | 439 |
| gCALR_019 | TGGGTGGATCCAAGTGCCCTT | 440 |
| gCALR_021 | CTCCAAGTCTCACCTGCCAGA | 441 |
| gCD247_001 | TGAGGGAAAGGACAAGATGAA | 442 |
| gCD247_002 | ACCGCGGCCATCCTGCAGGCA | 443 |
| gCD247_004 | GGATCCAGCAGGCCAAAGCTC | 444 |
| gCD247_005 | GCCTGCTGGATCCCAAACTCT | 445 |
| gCD247_007 | TGTGTTGCAGTTCAGCAGGAG | 446 |
| gCD247_011 | CTAGCAGAGAAGGAAGAACCC | 447 |
| gCD247_012 | ATCCCAATCTCACTGTAGGCC | 448 |
| gCD247_013 | ACTCCCAAACAACCAGCGCCG | 449 |
| gCD247_015 | CTTTCACGCCAGGGTCTCAGT | 450 |
| gCD247_016 | ACGCCAGGGTCTCAGTACAGC | 451 |
| gCD3G_001 | CCGGAGGACAGAGACTGACAT | 452 |
| gCD3G_004 | GCTTCTGCATCACAAGTCAGA | 453 |
| gCD3G_006 | TCTTCAGTTAGGAAGCCGATC | 454 |
| gCD3G_007 | AAGATGGGAAGATGATCGGCT | 455 |
| gCD3G_008 | CACTGATACATCCCTCGAGGG | 456 |
| gCD3G_011 | GTTCAATGCAGTTCTGACACA | 457 |
| gCD3G_012 | CCTACAGTGTGTCAGAACTGC | 458 |
| gCD3G_017 | CCTCTCGACTGGCGAACTCCA | 459 |
| gCD3G_022 | CTTGAAGGTGGCTGTACTGGT | 460 |
| gCD3G_023 | CAGGTACTTTGGCCCAGTCAA | 461 |
| gCD52_1 | CTCTTCCTCCTACTCACCATC | 462 |
| gCD52_10 | TCCTGAGAGTCCAGTTTGTAT | 463 |
| gCD52_4 | GCTGGTGTCGTTTTGTCCTGA | 464 |
| gCD52_9 | TTCGTGGCCAATGCCATAATC | 465 |
| gCD58_004 | CCAACAAATATATGGTGTTGT | 466 |
| gCD58_005 | AAGGCACATTGCTTGGTACAT | 467 |
| gCD58_010 | AAAGAGGTCCTATGGAAAAAA | 468 |
| gCD58_012 | AAAGATGAGAAAGCTCTGAAT | 469 |
| gCD58_018 | GCGATTCCATTTCATACTCAT | 470 |
| gCD58_019 | CAGAGTCTCTTCCATCTCCCA | 471 |
| gCD58_020 | CATTGCTCCATAGGACAATCC | 472 |
| gCD58_023 | AGATGGAAAATGATCTTCCAC | 473 |
| gCD58_028 | TAGGTCATTCAAGACACAGAT | 474 |
| gCD58_033 | GGTATTCTGAAATGTGACAGA | 475 |
| gCOL17A1_005 | TAGTTGTCACTGAAACAGTAA | 476 |
| gCOL17A1_006 | GCATAGCCATTGCTGGTCCCG | 477 |
| gCOL17A1_017 | ACTCCGTCCTCTGGTTGAAGA | 478 |
| gCOL17A1_024 | CAGTGTCAGGCACCTACGATG | 479 |
| gCOL17A1_047 | CTGTTCCATCATTAGCTTCTT | 480 |
| gCOL17A1_054 | AGGTGACATGGGAAGTCCAGG | 481 |
| gCOL17A1_065 | CAAGAAGCAGCAAACTGACCT | 482 |
| gCOL17A1_070 | GGTGACAAAGGACCAATGGGA | 483 |
| gCOL17A1_084 | AGAGGGGTCATCGATGCTCAC | 484 |
| gCOL17A1_094 | ATGCCGGCTCTACTGTACCTT | 485 |
| gDEFB134_001 | CCTGCCAGCACTGGATCCCAA | 486 |
| gDEFB134_004 | CTTTGGGATCCAGTGCTGGCA | 487 |
| gDEFB134_007 | CTTCCAGGTATAAATTCATTA | 488 |
| gDEFB134_008 | TTGTGCATTTCTGATGATAAT | 489 |
| gDEFB134_009 | TAGCATTTCTTGTGCATTTCT | 490 |
| gDEFB134_010 | ACTCTCATAGCATTCAAGTCT | 491 |
| gDEFB134_011 | ACACAGCACTCCAGCTGAAAC | 492 |
| gDEFB134_012 | CTTTGACACAGCACTCCAGCT | 493 |
| gDEFB134_013 | AGCTGGAGTGCTGTGTCAAAG | 494 |
| gDEFB134_014 | TTATGTCAGGGTGCAGGATTT | 495 |
| gERAP1_008 | CATGGATCAAGAGATCATAAT | 496 |
| gERAP1_015 | CAAAAGCACCTACAGAACCAA | 497 |
| gERAP1_029 | AGTCTGTCAGCAAGATAACCA | 498 |
| gERAP1_035 | GGTAGGGGATACGGTATGCTG | 499 |
| gERAP1_037 | AGCATACCGTATCCCCTACCC | 500 |
| gERAP1_039 | CATAGCACCAGACTGAAAGTC | 501 |
| gERAP1_061 | CCTTATCATAAGAAACATCAT | 502 |
| gERAP1_065 | AATGCGTCAGCACTAAGATAC | 503 |
| gERAP1_077 | CCCTAATAACCATCACAGTGA | 504 |
| gERAP1_078 | CTCTAGGAGCATTACCCAGTG | 505 |
| gERAP2_001 | TGTGTGAATTAACCATTGCAG | 506 |
| gERAP2_014 | ATGTATCTTGAATCTTCCTCT | 507 |
| gERAP2_018 | AGTTACCCTGCTCATGAACAA | 508 |
| gERAP2_046 | GAGAGTGGATAGTAGATATCA | 509 |
| gERAP2_048 | ATATCTACTATCCACTCTCCA | 510 |
| gERAP2_099 | ATGTGGACTCAAATGGTTACT | 511 |
| gERAP2_108 | CCTGTCAATCACTGGCTTAAA | 512 |
| gERAP2_118 | GAGCAATATGAACTGTCAATG | 513 |
| gERAP2_134 | ACTTGGGCTCATATGACATAA | 514 |
| gERAP2_261 | TCCTTACCATGTTACTTGTCA | 515 |
| gIFNGR1_004 | TTACAGTGCCTACACCAACTA | 516 |
| gIFNGR1_006 | CCGTAGAGGTAAAGAACTATG | 517 |
| gIFNGR1_008 | GTGTTAAGAATTCAGAATGGA | 518 |
| gIFNGR1_010 | ATGGATCACCAACATGATCAG | 519 |
| gIFNGR1_012 | ACTCTGACCCAAAGAGAATTT | 520 |
| gIFNGR1_021 | GGGATCATAATCGACTTCCTG | 521 |
| gIFNGR1_025 | AGTTGTAACACCCCACACATG | 522 |
| gIFNGR1_042 | GAGACAAAACCTGAATCAAAA | 523 |
| gIFNGR1_049 | AGTAGTAACCAGTCTGAACCT | 524 |
| gIFNGR1_052 | TGGAGTGATCACTCTCAGAAC | 525 |
| gIFNGR2_001 | TCTGTCCCCCTCAAGACCCTC | 526 |
| gIFNGR2_003 | AACTGCACTTGGTAGACAACA | 527 |
| gIFNGR2_005 | CTTCCCAGCACCGACAGTAAA | 528 |
| gIFNGR2_006 | AATGTCACTCTACGCCTTCGA | 529 |
| gIFNGR2_012 | CCAGTAATGGACATAATAACA | 530 |
| gIFNGR2_015 | AGTTATCCAATGAAATGGAGT | 531 |
| gIFNGR2_017 | ATTGGATAACTTAAAACCCTC | 532 |
| gIFNGR2_021 | GTAGCAAGATATGTTGCTTAA | 533 |
| gIFNGR2_026 | GCCTCCACTGAGCTTCAGCAA | 534 |
| gIFNGR2_031 | ACACTCCACCAAGCATCCCAT | 535 |
| gJAK1_002 | CTTCCACAACAGTATCTAAAT | 536 |
| gJAK1_021 | GCTACAAGCGATATATTCCAG | 537 |
| gJAK1_037 | ATTCGAATGACGGTGGAAACG | 538 |
| gJAK1_059 | GCATGAAGCTGATGTTATCCG | 539 |
| gJAK1_074 | GTACACACATTTCCATGGACC | 540 |
| gJAK1_075 | CCAGAGCGTGGTTCCAAAGCT | 541 |
| gJAK1_090 | AGATCAGCTATGTGGTTACCT | 542 |
| gJAK1_100 | CCTTACAAATCTGAACGGCAT | 543 |
| gJAK1_108 | ACCAAAGCAATTGAAACCGAT | 544 |
| gJAK1_111 | GATTGCATTAAACATTCTGGA | 545 |
| gJAK2_009 | GAAGCAGCAATACAGATTTCT | 546 |
| gJAK2_101 | AAGGCGTACGAAGAGAAGTAG | 547 |
| gJAK2_118 | AGATATGTATCTAGTGATCCA | 548 |
| gJAK2_121 | GATCACTAGATACATATCTGA | 549 |
| gJAK2_126 | GCACATACATTCCCATGAATA | 550 |
| gJAK2_132 | AATGCATTCAGGTGGTACCCA | 551 |
| gJAK2_137 | CCACAAAGTGGTACCAAAACT | 552 |
| gJAK2_175 | AAGATAGTCTCGTAAACTTCC | 553 |
| gJAK2_187 | GGTTAACCAAAGTCTTGCCAC | 554 |
| gJAK2_191 | CAGGTATGCTCCAGAATCACT | 555 |
| gmir-101- | GGTTATCATGGTACCGATGCT | 556 |
| 2_001 | | |
| gmir-101- | AGATATACAGCATCGGTACCA | 557 |
| 2_002 | | |
| gmir-101- | TCAATGTGATGGCACCACCAT | 558 |
| 2_003 | | |
| gMLANA_001 | AACTTACTCTTCAGCCGTGGT | 559 |
| gMLANA_002 | TCTATCTCTTGGGCCAGGGCC | 560 |
| gMLANA_003 | GTCTTCTACAATACCAACAGC | 561 |
| gMLANA_004 | CCAACCATCAAGGCTCTGTAT | 562 |
| gMLANA_008 | CATTTCAGGATAAAAGTCTTC | 563 |
| gMLANA_009 | AGGATAAAAGTCTTCATGTTG | 564 |
| gMLANA_010 | CTGTCCCGATGATCAAACCCT | 565 |
| gMLANA_011 | TCTTGAAGAGACACTTTGCTG | 566 |
| gMLANA_012 | ATCATCGGGACAGCAAAGTGT | 567 |
| gMLANA_020 | TCATAAGCAGGTGGAGCATTG | 568 |
| gPSMB5_001 | TGCCCACACTAGACATGGCGC | 569 |
| gPSMB5_002 | GGACTTGGGGGTCGTGCAGAT | 570 |
| gPSMB5_003 | GATTCCTGGCTCTTCTGGGAC | 571 |
| gPSMB5_005 | CTCTGATCTTAACAGTTCCGC | 572 |
| gPSMB5_006 | GAAGCTCATAGATTCGACATT | 573 |
| gPSMB5_007 | GAGGCAGCTGCTACAGAGATG | 574 |
| gPSMB5_008 | TACTGATACACCATGTTGGCA | 575 |
| gPSMB5_010 | CAGGCCTCTACTACGTGGACA | 576 |
| gPSMB5_011 | AGGGGCCACCTTCTCTGTAGG | 577 |
| gPSMB5_012 | AGGGGGTAGAGCCACTATACT | 578 |
| gPSMB8_001 | TCTATGCGATCTCCAGAGCTC | 579 |
| gPSMB8_004 | TCTTATCAGCCCACAGAATTC | 580 |
| gPSMB8_005 | TCCGTCCCCACCCAGGGACTG | 581 |
| gPSMB8_008 | AGTGTCGGCAGCCTCCAAGCT | 582 |
| gPSMB8_010 | ATCTTATAGGGTCCTGGACTC | 583 |
| gPSMB8_011 | CTGAGAGCCGAGTCCCATGTT | 584 |
| gPSMB8_012 | TCATTTGTCCACAGTGTACCA | 585 |
| gPSMB8_013 | ACCCAACCATCTTCCTTCATG | 586 |
| gPSMB8_014 | TCCACAGTGTACCACATGAAG | 587 |
| gPSMB8_015 | TACTTTCACCCAACCATCTTC | 588 |
| gPSMB9_001 | ACGGGGGCGTTGTGATGGGTT | 589 |
| gPSMB9_002 | CTCACCCTGCAGACACTCGGG | 590 |
| gPSMB9_005 | CCTCAGGATAGAACTGGAGGA | 591 |
| gPSMB9_007 | TCACCACATTTGCAGCAGCCA | 592 |
| gPSMB9_009 | GCTGCTGCAAATGTGGTGAGA | 593 |
| gPSMB9_010 | GGAGAAACTCACCTGACCTCC | 594 |
| gPSMB9_011 | ACCTGAGGATCCCTTTCCCAG | 595 |
| gPSMB9_012 | CCAGGTATATGGAACCCTGGG | 596 |
| gPSMB9_014 | TCTATGGTTATGTGGATGCAG | 597 |
| gPSMB9_015 | GCAGTTCATTGCCCAAGATGA | 598 |
| gPTCD2_005 | ACCACATTATCTGTAAGTAGG | 599 |
| gPTCD2_007 | GCTAAAAGATACCTACTTACA | 600 |
| gPTCD2_011 | GTGCCAGAAAGATTACATGCA | 601 |
| gPTCD2_018 | ATTACCAGGTACCATGCAGAG | 602 |
| gPTCD2_026 | TTCTCAGACTCCACATCATTC | 603 |
| gPTCD2_032 | ATCTCTATCAATACTTGCAAA | 604 |
| gPTCD2_033 | GCAGGTGCTTTGCAAGTATTG | 605 |
| gPTCD2_042 | CCTGATTCAGAGCTAATGCCA | 606 |
| gPTCD2_043 | GCTGTGGCATTAGCTCTGAAT | 607 |
| gPTCD2_064 | ATAGCAACGTGTGAGATTTCC | 608 |
| gRFX5_008 | TGTAGCTCAGAGCCAAGTACA | 609 |
| gRFX5_012 | GCAAGATCATCAGAGAGATCT | 610 |
| gRFX5_013 | ACTTGCATCAGATATTGCTAC | 611 |
| gRFX5_015 | GTACTTACACTCTCAGAACCC | 612 |
| gRFX5_016 | AGGATCCGCTCTGCCCAGTCA | 613 |
| gRFX5_017 | GTACCTCTGCAGAAGAGGACG | 614 |
| gRFX5_018 | GATGACCGTTCCCGAGGTGCA | 615 |
| gRFX5_026 | GCTGGTGGAGCCTGCCCACTG | 616 |
| gRFX5_028 | GCATCACTTGCTGTATCCTCT | 617 |
| gRFX5_038 | GCTTCTGCTGCCCTTGATGAC | 618 |
| gRFXANK_001 | CCCATGGAGCTTACCCAGCCT | 619 |
| gREXANK_002 | CCTGCACCCCTGAGCCTGTGA | 620 |
| gRFXANK_003 | CCAGCAGGCAGCTCCCTGAAG | 621 |
| gRFXANK_005 | GAGAGATTGAGACCGTTCGCT | 622 |
| gRFXANK_006 | CCAGGATGTGGGGGTCGGCAC | 623 |
| gRFXANK_007 | TCCTGCCCCTACCCACGACAG | 624 |
| gRFXANK_008 | ACGTGGTTCCCGCGCACAGCG | 625 |
| gRFXANK_009 | CAGCCCGAGGCGCTGACCTCA | 626 |
| gRFXANK_010 | CGGTATCCCAGGGCCACGGCA | 627 |
| gRFXANK_011 | CCTGCCCCATCTCAGTGCAAC | 628 |
| gREXAP_001 | GAGGATCTAGAGGACGAGGAG | 629 |
| gRFXAP_004 | TACTTGTCCTTGTACATCTTG | 630 |
| gRFXAP_005 | CCGCGCTGCCAGTCGAGGCAG | 631 |
| gRFXAP_009 | ACAATGGAGAGTATGTTATCT | 632 |
| gRFXAP_012 | GGGATCGTCCTGCAAGACCTA | 633 |
| gRFXAP_016 | GAACAAGTGTTAAATCAAAAA | 634 |
| gRFXAP_020 | TAAGTCGTTACTAAGAAGTCC | 635 |
| gRFXAP_021 | TGTAAAAATTGCACTACTTCT | 636 |
| gRFXAP_023 | CAGAAACAGCAACAGCTATTA | 637 |
| gRFXAP_025 | GAGCAAAGACAACAGCAGTTT | 638 |
| gRPL23_003 | GCACCAGAGGACCCACCACGT | 639 |
| gRPL23_004 | TATCCACAGGACGTGGTGGGT | 640 |
| gRPL23_008 | TAGGAGCCAAAAACCTGTATA | 641 |
| gRPL23 013 | GTTGTCGAATGACCACTGCTG | 642 |
| gRPL23_014 | TTCTCTCAGTACATCCAGCAG | 643 |
| gRPL23_019 | AAGATAATGCAGGAGTCATAG | 644 |
| gRPL23_021 | CTACCTTTCATCTCGCCTTTA | 645 |
| gRPL23_025 | ATGCAGGTTCTGCCATTACAG | 646 |
| gRPL23_026 | CAAATATACTGGAGAATCATG | 647 |
| gRPL23_027 | CCTTCCCTTTATATCCACAGG | 648 |
| gSOX10_001 | CTGGCGCCGTTGACGCGCACG | 649 |
| gSOX10_002 | TTGTGCTGCATACGGAGCCGC | 650 |
| gSOx10_003 | ATGTGGCTGAGTTGGACCAGT | 651 |
| gSOX10_004 | GCATCCACACCAGGTGGTGAG | 652 |
| gSOx10_005 | ACTACTCTGACCATCAGCCCT | 653 |
| gSOx10_006 | GGGCCGGGACAGTGTCGTATA | 654 |
| gSRP54_011 | TCTTAGTTGCTTCACTAGTTT | 655 |
| gSRP54_020 | GTGGGTGTCCATGCCTTAACT | 656 |
| gSRP54_021 | GCTTGTAGACCCTGGAGTTAA | 657 |
| gSRP54_024 | CCACTCCCTTGCAATCCAACA | 658 |
| gSRP54_029 | TCACCCAGCTAGCATATTATT | 659 |
| gSRP54_030 | ATATGTGCAGACACATTCAGA | 660 |
| gSRP54_064 | ATTGGTACAGGGGAACATATA | 661 |
| gSRP54_087 | GCACCATCCGTACTGTCTAGT | 662 |
| gSRP54_090 | GTAAACAACCAGGAAGAATCC | 663 |
| gSRP54_096 | CCCTCAGGTGGCGACATGTCT | 664 |
| gSRP54_139 | AGGATAACTAACCAAGATCTG | 665 |
| gSTAT1_003 | CATGGGAAAACTGTCATCATA | 666 |
| gSTAT1_005 | TAACCACTGTGCCAGGTACTG | 667 |
| gSTAT1_009 | ATGACCTCCTGTCACAGCTGG | 668 |
| gSTAT1_013 | TTCTAACCACTCAAATCTAGG | 669 |
| gSTAT1_014 | AGGAAGACCCAATCCAGATGT | 670 |
| gSTAT1_026 | TAGTGTATAGAGCATGAAATC | 671 |
| gSTAT1_032 | TGATCACTCTTTGCCACACCA | 672 |
| gSTAT1_102 | CCTGACATCATTCGCAATTAC | 673 |
| gSTAT1_103 | GATACAGATACTTCAGGGGAT | 674 |
| gSTAT1_113 | GTCACCCTTCTAGACTTCAGA | 675 |
| gTap1_011 | GAGTGAAGGTATCGGCTGAGC | 676 |
| gTap1_012 | AGCCCCCAGACCTGGCTATGG | 677 |
| gTap1_016 | AGGAGAAACCTGTCTGGTTCT | 678 |
| gTap1_020 | CTTCTGCCCAAGAAGGTGGGA | 679 |
| gTap1_026 | GGGAAAAGCTGCAAGAAATAA | 680 |
| gTap1_030 | AGGTATGCTGCTGAAAGTGGG | 681 |
| gTap1_033 | TCTGAGGAGCCCACAGCCTTC | 682 |
| gTap1_035 | GGTAGGCAAAGGAGACATCTT | 683 |
| gTap1_036 | CCTACCCAAACCGCCCAGATG | 684 |
| gTap1_039 | GAAGAAGTCTTCAAGAAAATA | 685 |
| gTAP2_004 | GCAGCCCCCACAGCCCTCCCA | 686 |
| gTAP2_008 | AGGTGAGACATTAATCCCTCA | 687 |
| gTAP2_014 | AAGGAAGCCAGTTACTCATCA | 688 |
| gTAP2_027 | CAGACCCTGGTATACATATAT | 689 |
| gTAP2_028 | GCTGTCGGTCCATGTAGGAGA | 690 |
| gTAP2_029 | TCCTACATGGACCGACAGCCA | 691 |
| gTAP2_030 | ACAACCCCCTGCAGAGTGGTG | 692 |
| gTAP2_037 | ATCCAGCAGCACCTGTCCCCC | 693 |
| gTAP2_038 | AGTTGGGCAGGAGCCTGTGCT | 694 |
| gTAP2_040 | TAGAAGATACCTGTGTATATT | 695 |
| gTAPBP_001 | CGCTCGCATCCTCCACGAACC | 696 |
| gTAPBP_002 | GCAGAGGCGGGGAGAGGCACG | 697 |
| gTAPBP_003 | CCTACATGCCCCCCACCTCCG | 698 |
| gTAPBP_004 | GGCTAGAGTGGCGACGCCAGC | 699 |
| gTAPBP_007 | AGGAGGGCACCTATCTGGCCA | 700 |
| gTAPBP_010 | GTCCTCTTTCCCCAGAACCCC | 701 |
| gTAPBP_011 | CCCAGAACCCCCCAAAGTGTC | 702 |
| gTAPBP_012 | AGGGCCCTCCCTTGAGGACAG | 703 |
| gTAPBP_013 | CTGTCTGCCTTTCTTCTGCTT | 704 |
| gTAPBP_016 | CCCACAGCTGTCTACCTGTCC | 705 |
| gTWF1_005 | CACAGCAAGTGAAGATGTTAA | 706 |
| gTWF1_012 | ATAGAGCAACTTGTGATTGGA | 707 |
| gTWF1_015 | CCCCTGTTGGAGGACAAACAA | 708 |
| gTWF1_018 | ATGTGGCCACCTCCAAATTCC | 709 |
| gTWF1_020 | GAGGTGGCCACATTAAAGATG | 710 |
| gTWF1_022 | ATCTGTCGTAGTTCTTCCTCA | 711 |
| gTWF1_051 | CAGATCGAGATAGACAATGGG | 712 |
| gTWF1_053 | TGAAGAAGTACATCCCAAGCA | 713 |
| gTWF1_060 | ATGTGATGACTTTAATCAGTA | 714 |
| gTWF1_101 | AAATAGGTGGGCTACCTTTCT | 715 |

TABLE 9
Spacer Sequences Targeting Human CD3D
and NLRC5 Genes

| | | SEQ ID |
|---|---|---|
| crRNA | Spacer Sequence | NO |
| gCD3D_001 | TCTCTGGCCTGGTACTGGCTA | 716 |
| gCD3D_002 | CCCTTTAGTGAGCCCCTTCAA | 717 |
| gCD3D_003 | GTGAGCCCCTTCAAGATACCT | 718 |
| gCD3D_004 | TGAATTGCAATACCAGCATCA | 719 |
| gCD3D_005 | CCAGGTCCAGTCTTGTAATGT | 720 |
| gCD3D_006 | TCCTTGTATATATCTGTCCCA | 721 |
| gCD3D_007 | GGAGTCTTCTGCTTTGCTGGA | 722 |
| gCD3D_008 | CTGGACATGAGACTGGAAGGC | 723 |
| gCD3D_009 | TCTTCTCCTCTCTTAGCCCCT | 724 |
| gCD3D_010 | CTCCAAGGTGGCTGTACTGAG | 725 |
| gNLRC5_001 | GCTCCTGTAGCGCTGCTGGGC | 726 |
| gNLRC5_002 | GGGAAGGCTGGCATGGGCAAG | 727 |
| gNLRC5_003 | CAGGCCCTGTTCCTTTTTGAA | 728 |
| gNLRC5_004 | AATTCCGCCAGCTCAACTTGA | 729 |
| gNLRC5_005 | ATCTGTACCTGAGCCCTGAAT | 730 |
| gNLRC5_006 | ATGGGCTAGATGAGGCCCTCC | 731 |
| gNLRC5_007 | TCCCATCTCTGCAATGGGACC | 732 |
| gNLRC5_008 | ATGGGCCACGGGTGGAAGAAT | 733 |
| gNLRC5_009 | TCTGTAACTCCACCAGGGCCC | 734 |
| gNLRC5_010 | CATAGAAGATAACCTTCCCTG | 735 |
| gNLRC5_011 | GGGCCACTCACAGCCTGCTGA | 736 |
| gNLRC5_012 | ACCCACCTCAGCCTGCAGGAG | 737 |
| gNLRC5_013 | TTCACCTTGGGGCTGGCCATC | 738 |
| gNLRC5_014 | TTGCTGCCCTGCACCTGATGG | 739 |
| gNLRC5_015 | GTCCGCTGTACCCAGCGGGAA | 740 |
| gNLRC5_016 | GCCCTGTGAGCTTGCGGGTGG | 741 |
| gNLRC5_017 | TGCGGTGAGACTGGCCAGCTC | 742 |
| gNLRC5_018 | CCACTGACCTGCACCGACCTG | 743 |
| gNLRC5_019 | ATGGCTGTCCCCTGGAGCCCC | 744 |

[0074] The spacer sequences provided in Tables 1-9 are designed based upon identification of target nucleotide sequences associated with a PAM in a given target gene locus, and are selected based upon the editing efficiency detected in human cells.

[0075] To provide sufficient targeting to the target nucleotide sequence, the spacer sequence is generally 16 or more nucleotides in length. In certain embodiments, the spacer sequence is at least 16, 17, 18, 19, 20, 21, 22, 23, 24, 25, 26, 27, 28, 29, 30, 35, 40, 45, 50, or 75 nucleotides in length. In certain embodiments, the spacer sequence is shorter than or equal to 75, 50, 45, 40, 35, 30, 25, 21, or 20 nucleotides in length. Shorter spacer sequence may be desirable for reducing off-target events. Accordingly, in certain embodiments, the spacer sequence is shorter than or equal to 21, 20, 19, 18, or 17 nucleotides. In certain embodiments, the spacer sequence is 17-30 nucleotides in length, e.g., 17-21, 17-22, 17-23, 17-24, 17-25, 17-30, 20-21, 20-22, 20-23, 20-24, 20-25, or 20-30 nucleotides in length, for example 20-22 nucleotides in length, such as 20 or 21 nucleotides in length. In certain embodiments, the spacer sequence is 21 nucleotides in length. In certain embodiments, the spacer sequence is 20 nucleotides in length.

[0076] In certain embodiments, the spacer sequence comprises a portion of a spacer sequence listed in any of the Tables 1-9, wherein the portion is 16, 17, 18, 19, or 20 nucleotides in length. In certain embodiments, the spacer sequence comprises nucleotides 1-16, 1-17, 1-18, 1-19, or 1-20 of a spacer sequence listed in any of the Tables 1-9. In specific embodiments, the spacer sequence consists of nucleotides 1-16, 1-17, 1-18, 1-19, or 1-20 of a spacer sequence listed in any of the Tables 1-9.

[0077] In certain embodiments, the spacer sequence is 21 nucleotides in length. In certain embodiments, the spacer sequence consists of a spacer sequence shown in any of the Tables 1-9.

[0078] In certain embodiments, the spacer sequence, where it is longer than 21 nucleotides in length, comprises a spacer sequence shown in any of the Tables 1-9 and one or more nucleotides. In certain embodiments, the one or more nucleotides are 3′ to the spacer sequence shown in any of the Tables 1-9.

[0079] In certain embodiments, the spacer sequence is at least 70%, at least 75%, at least 80%, at least 85%, at least 90%, at least 93%, at least 94%, at least 95%, at least 96%, at least 97%, at least 98%, or at least 99% complementary to the target nucleotide sequence. In certain embodiments, the spacer sequence is 100% complementary to the target nucleotide sequence in the seed region (at least 5 base pairs proximal to the PAM). In certain embodiments, the spacer sequence is 100% complementary to the target nucleotide sequence. The spacer sequences listed in any of the Tables 1-9 are designed to be 100% complementary to the wild-type sequence of the corresponding target gene. Accordingly, it is contemplated that a spacer sequence useful for targeting a gene listed in any of the Tables 1-9 can be at least 70%, at least 75%, at least 80%, at least 85%, at least 90%, at least 93%, at least 94%, at least 95%, at least 96%, at least 97%, at least 98%, or at least 99% identical to a corresponding spacer sequence listed in any of the Tables 1-9, or a portion thereof disclosed herein. In certain embodiments, the spacer sequence is 1, 2, 3, 4, 5, 6, 7, 8, 9, or 10 nucleotides different from a sequence listed in any of the Tables 1-9. In certain embodiments, the spacer sequence is 100% identical to a sequence listed in any of the Tables 1-9 in the seed region (at least 5 base pairs proximal to the PAM). It has been reported that compared to DNA binding, DNA cleavage is less tolerant to mismatches between the spacer sequence and the target nucleotide sequence (see, Klein et al. (2018) CELL REPORTS, 22: 1413). Accordingly, in certain embodiments, a guide nucleic acid to be used with a Cas nuclease comprises a spacer sequence 100% complementary to the target nucleotide sequence. In certain embodiments, a guide nucleic acid to be used with a Cas nuclease comprises a spacer sequence listed in any of the Tables 1-9, or a portion thereof disclosed herein.

[0080] The present invention also provides guide nucleic acids targeting human DHODH, PLK1, MVD, TUBB, or U6 gene comprising the spacer sequences provided below in Table 20. DHODH, PLK1, MVD, and TUBB are known to be essential genes. It is contemplated that the guide nucleic acids targeting these genes, particularly the ones that edit the respective genomic locus at height efficiency (e.g., at least 50%, at least 60%, at least 70%, at least 80%, or at least 90%), can be used as positive controls for assessing transfection efficiency and other experimental processes. The spacer sequences targeting U6 in Table 20 are designed to hybridize with the promoter region of human U6 gene and can be used to assess expression of an inserted gene from the endogenous U6 promoter.

### A. Cas Proteins

[0081] The guide nucleic acid of the present invention, either as a single guide nucleic acid alone or as a targeter nucleic acid used in combination with a cognate modulator nucleic acid, is capable of binding a CRISPR Associated (Cas) protein. In certain embodiments, the guide nucleic acid, either as a single guide nucleic acid alone or as a targeter nucleic acid used in combination with a cognate modulator nucleic acid, is capable of activating a Cas nuclease.

[0082] The terms “CRISPR-Associated protein,” “Cas protein,” and “Cas,” as used interchangeably herein, can include a naturally occurring Cas protein or an engineered Cas protein. Non-limiting examples of Cas protein engineering includes but are not limited to mutations and modifications of the Cas protein that alter the activity of the Cas, alter the PAM specificity, broaden the range of recognized PAMs, and/or reduce the ability to modify one or more off-target loci as compared to a corresponding unmodified Cas. In certain embodiments, the altered activity of the engineered Cas comprises altered ability (e.g., specificity or kinetics) to bind the naturally occurring crRNA or engineered dual guide nucleic acids, altered ability (e.g., specificity or kinetics) to bind the target nucleotide sequence, altered processivity of nucleic acid scanning, and/or altered effector (e.g., nuclease) activity. A Cas protein having the nuclease activity is referred to as a “CRISPR-Associated nuclease” or “Cas nuclease,” as used interchangeably herein.

[0083] In certain embodiments, the Cas protein is a type V-A, type V-C, or type V-D Cas protein. In certain embodiments, the Cas protein is a type V-A Cas protein. In other embodiments, the Cas protein is a type II Cas protein, e.g., a Cas9 protein.

[0084] In certain embodiments, the Cas nuclease is a type V-A, type V-C, or type V-D Cas nuclease. In certain embodiments, the Cas nuclease is a type V-A Cas nuclease. In other embodiments, the Cas protein is a type II Cas nuclease, e.g., a Cas9 nuclease.

[0085] In certain embodiments, the type V-A Cas protein comprises Cpf1. Cpf1 proteins are known in the art and are described in U.S. Pat. Nos. 9,790,490 and 10,113,179. Cpf1 orthologs can be found in various bacterial and archaeal genomes. For example, in certain embodiments, the Cpf1 protein is derived from Francisella novicida U112 (Fn), Acidaminococcus sp. BV3L6 (As), Lachnospiraceae bacterium ND2006 (Lb), Lachnospiraceae bacterium MA2020 (Lb2), Candidatus Methanoplasma termitum (CMt), Moraxella bovoculi 237 (Mb), Porphyromonas crevioricanis (Pc), Prevotella disiens (Pd), Francisella tularensis 1, Francisella tularensis subsp. novicida, Prevotella albensis, Lachnospiraceae bacterium MC2017 1, Butyrivibrio proteoclasticus, Peregrinibacteria bacterium GW2011_GWA2_33_10, Parcubacteria bacterium GW2011_GWC2_44_17, Smithella sp. SCADC, Eubacterium eligens, Leptospira inadai, Porphyromonas macacae, Prevotella bryantii (Pb), Proteocatella sphenisci (Ps), Anaerovibrio sp. RM50 (As2), Moraxella caprae (Mc), Lachnospiraceae bacterium COE1 (Lb3), or Eubacterium coprostanoligenes (Ec).

[0086] In certain embodiments, the type V-A Cas protein comprises AsCpf1 or a variant thereof. In certain embodiments, the type V-A Cas protein comprises an amino acid sequence at least 30%, at least 40%, at least 50%, at least 60%, at least 70%, at least 75%, at least 80%, at least 85%, at least 90%, at least 91%, at least 92%, at least 93%, at least 94%, at least 95%, at least 96%, at least 97%, at least 98%, or at least 99% identical to the amino acid sequence set forth in SEQ ID NO: 3. In certain embodiments, the type V-A Cas protein comprises the amino acid sequence set forth in SEQ ID NO: 3.

AsCpf1
(SEQ ID NO: 3)
MTQFEGFTNLYQVSKTLRFELIPQGKTLKHIQEQGFIEEDKARNDHYKELKPIIDRIYKTYADQC
LQLVQLDWENLSAAIDSYRKEKTEETRNALIEEQATYRNAIHDYFIGRTDNLTDAINKRHAEIYK
GLFKAELFNGKVLKQLGTVTTTEHENALLRSEDKETTYFSGFYENRKNVESAEDISTAIPHRIVQ
DNFPKFKENCHIFTRLITAVPSLREHFENVKKAIGIFVSTSIEEVESFPFYNQLLTQTQIDLYNQ
LLGGISREAGTEKIKGLNEVLNLAIQKNDETAHIIASLPHRFIPLFKQILSDRNTLSFILEEFKS
DEEVIQSFCKYKTLLRNENVLETAEALFNELNSIDLTHIFISHKKLETISSALCDHWDTLRNALY
ERRISELTGKITKSAKEKVQRSLKHEDINLQEIISAAGKELSEAFKOKTSEILSHAHAALDQPLP
TTLKKQEEKEILKSQLDSLLGLYHLLDWFAVDESNEVDPEFSARLTGIKLEMEPSLSFYNKARNY
ATKKPYSVEKFKLNFQMPTLASGWDVNKEKNNGAILFVKNGLYYLGIMPKOKGRYKALSFEPTEK
TSEGFDKMYYDYFPDAAKMIPKCSTOLKAVTAHFQTHTTPILLSNNFIEPLEITKEIYDLNNPEK
EPKKFQTAYAKKTGDQKGYREALCKWIDFTRDELSKYTKTTSIDLSSLRPSSQYKDLGEYYAELN
PLLYHISFQRIAEKEIMDAVETGKLYLFQIYNKDFAKGHHGKPNLHTLYWTGLESPENLAKTSIK
LNGQAELFYRPKSRMKRMAHRLGEKMLNKKLKDQKTPIPDTLYQELYDYVNHRLSHDLSDEARAL
LPNVITKEVSHEIIKDRRFTSDKFFFHVPITLNYQAANSPSKENQRVNAYLKEHPETPIIGIDRG
ERNLIYITVIDSTGKILEQRSLNTIQQFDYQKKLDNREKERVAARQAWSVVGTIKDLKQGYLSQV
IHEIVDLMIHYQAVVVLENLNFGFKSKRTGIAEKAVYQQFEKMLIDKLNCLVLKDYPAEKVGGVL
NPYQLTDQFTSFAKMGTQSGELFYVPAPYTSKIDPLTGFVDPFVWKTIKNHESRKHFLEGEDELH
YDVKTGDFILHFKMNRNLSFQRGLPGEMPAWDIVFEKNETQFDAKGTPFIAGKRIVPVIENHRET
GRYRDLYPANELIALLEEKGIVERDGSNILPKLLENDDSHAIDTMVALIRSVLQMRNSNAATGED
YINSPVRDLNGVCFDSRFQNPEWPMDADANGAYHIALKGQLLLNHLKESKDLKLQNGISNODWLA
YIQELRN

[0087] In certain embodiments, the type V-A Cas protein comprises LbCpf1 or a variant thereof. In certain embodiments, the type V-A Cas protein comprises an amino acid sequence at least 30%, at least 40%, at least 50%, at least 60%, at least 70%, at least 75%, at least 80%, at least 85%, at least 90%, at least 91%, at least 92%, at least 93%, at least 94%, at least 95%, at least 96%, at least 97%, at least 98%, or at least 99% identical to the amino acid sequence set forth in SEQ ID NO: 4. In certain embodiments, the type V-A Cas protein comprises the amino acid sequence set forth in SEQ ID NO: 4.

LbCpf1
(SEQ ID NO: 4)
MSKLEKFTNCYSLSKTLRFKAIPVGKTQENIDNKRLLVEDEKRAEDYKGVKKLLDRYYLSFINDV
LHSIKLKNLNNYISLERKKTRTEKENKELENLEINLRKEIAKAFKGNEGYKSLEKKDIIETILPE
FLDDKDEIALVNSENGFTTAFTGFFDNRENMESEEAKSTSIAFRCINENLTRYISNMDIFEKVDA
IFDKHEVQEIKEKILNSDYDVEDFFEGEFFNFVLTQEGIDVYNAIIGGFVTESGEKIKGLNEYIN
LYNQKTKQKLPKFKPLYKQVLSDRESLSFYGEGYTSDEEVLEVERNTLNKNSEIFSSIKKLEKLE
KNFDEYSSAGIFVKNGPAISTISKDIFGEWNVIRDKWNAEYDDIHLKKKAVVTEKYEDDRRKSFK
KIGSFSLEQLQEYADADLSVVEKLKEIIIQKVDEIYKVYGSSEKLEDADEVLEKSLKKNDAVVAI
MKDLLDSVKSFENYIKAFFGEGKETNRDESFYGDFVLAYDILLKVDHIYDAIRNYVTQKPYSKDK
FKLYFQNPQFMGGWDKDKETDYRATILRYGSKYYLAIMDKKYAKCLQKIDKDDVNGNYEKINYKL
LPGPNKMLPKVFFSKKWMAYYNPSEDIQKIYKNGTFKKGDMENLNDCHKLIDFFKDSISRYPKWS
NAYDENESETEKYKDIAGFYREVEEQGYKVSFESASKKEVDKLVEEGKLYMFQIYNKDESDKSHG
TPNLHTMYFKLLFDENNHGQIRLSGGAELFMRRASLKKEELVVHPANSPIANKNPDNPKKTTTLS
YDVYKDKRESEDQYELHIPIAINKCPKNIFKINTEVRVLLKHDDNPYVIGIDRGERNLLYIVVVD
GKGNIVEQYSLNEIINNENGIRIKTDYHSLLDKKEKERFEARQNWTSIENIKELKAGYISQVVHK
ICELVEKYDAVIALEDLNSGFKNSRVKVEKQVYQKFEKMLIDKLNYMVDKKSNPCATGGALKGYQ
ITNKFESFKSMSTQNGFIFYIPAWLTSKIDPSTGFVNLLKTKYTSIADSKKFISSEDRIMYVPEE
DLFEFALDYKNFSRTDADYIKKWKLYSYGNRIRIFRNPKKNNVEDWEEVCLTSAYKELENKYGIN
YQQGDIRALLCEQSDKAFYSSFMALMSLMLQMRNSITGRTDVDFLISPVKNSDGIFYDSRNYEAQ
ENAILPKNADANGAYNIARKVLWAIGQFKKAEDEKLDKVKIAISNKEWLEYAQTSVKH

[0088] In certain embodiments, the type V-A Cas protein comprises FnCpf1 or a variant thereof. In certain embodiments, the type V-A Cas protein comprises an amino acid sequence at least 30%, at least 40%, at least 50%, at least 60%, at least 70%, at least 75%, at least 80%, at least 85%, at least 90%, at least 91%, at least 92%, at least 93%, at least 94%, at least 95%, at least 96%, at least 97%, at least 98%, or at least 99% identical to the amino acid sequence set forth in SEQ ID NO: 5. In certain embodiments, the type V-A Cas protein comprises the amino acid sequence set forth in SEQ ID NO: 5.

FnCpf1
(SEQ ID NO: 5)
MSIYQEFVNKYSLSKTLRFELIPQGKTLENIKARGLILDDEKRAKDYKKAKQIIDKYHQFFIEEI
LSSVCISEDLLQNYSDVYFKLKKSDDDNLQKDFKSAKDTIKKQISEYIKDSEKFKNLENQNLIDA
KKGQESDLILWLKQSKDNGIELFKANSDITDIDEALEIIKSFKGWTTYFKGEHENRKNVYSSNDI
PTSIIYRIVDDNLPKFLENKAKYESLKDKAPEAINYEQIKKDLAEELTFDIDYKTSEVNQRVESL
DEVFEIANFNNYLNQSGITKENTIIGGKFVNGENTKRKGINEYINLYSQQINDKTLKKYKMSVLF
KQILSDTESKSFVIDKLEDDSDVVTTMQSFYEQIAAFKTVEEKSIKETLSLLEDDLKAQKLDLSK
IYFKNDKSLTDLSQQVEDDYSVIGTAVLEYITQQIAPKNLDNPSKKEQELIAKKTEKAKYLSLET
IKLALEEFNKHRDIDKQCRFEEILANFAAIPMIFDEIAQNKDNLAQISIKYQNQGKKDLLQASAE
DDVKAIKDLLDQTNNLLHKLKIFHISQSEDKANILDKDEHFYLVFEECYFELANIVPLYNKIRNY
ITQKPYSDEKFKLNFENSTLANGWDKNKEPDNTAILFIKDDKYYLGVMNKKNNKIFDDKAIKENK
GEGYKKIVYKLLPGANKMLPKVFFSAKSIKFYNPSEDILRIRNHSTHTKNGSPQKGYEKFEFNIE
DCRKFIDFYKQSISKHPEWKDFGFRESDTQRYNSIDEFYREVENQGYKLTFENISESYIDSVVNQ
GKLYLFQIYNKDFSAYSKGRPNLHTLYWKALFDERNLQDVVYKLNGEAELFYRKQSIPKKITHPA
KEAIANKNKDNPKKESVFEYDLIKDKRFTEDKFFFHCPITINFKSSGANKENDEINLLLKEKAND
VHILSIDRGERHLAYYTLVDGKGNIIKQDTENIIGNDRMKTNYHDKLAAIEKDRDSARKDWKKIN
NIKEMKEGYLSQVVHEIAKLVIEYNAIVVFEDLNFGEKRGREKVEKQVYQKLEKMLIEKLNYLVE
KDNEFDKTGGVLRAYQLTAPFETFKKMGKQTGIIYYVPAGFTSKICPVTGFVNQLYPKYESVSKS
QEFFSKEDKICYNLDKGYFEFSEDYKNFGDKAAKGKWTIASFGSRLINERNSDKNHNWDTREVYP
TKELEKLLKDYSIEYGHGECIKAAICGESDKKFFAKLTSVLNTILQMRNSKIGTELDYLISPVAD
VNGNFFDSRQAPKNMPQDADANGAYHIGLKGLMLLGRIKNNQEGKKLNLVIKNEEYFEFVONRNN

[0089] In certain embodiments, the type V-A Cas protein comprises PbCpf1 or a variant thereof. In certain embodiments, the type V-A Cas protein comprises an amino acid sequence at least 30%, at least 40%, at least 50%, at least 60%, at least 70%, at least 75%, at least 80%, at least 85%, at least 90%, at least 91%, at least 92%, at least 93%, at least 94%, at least 95%, at least 96%, at least 97%, at least 98%, or at least 99% identical to the amino acid sequence set forth in SEQ ID NO: 6. In certain embodiments, the type V-A Cas protein comprises the amino acid sequence set forth in SEQ ID NO: 6.

PbCpf1
(SEQ ID NO: 6)
MQINNLKIIYMKFTDETGLYSLSKTLRFELKPIGKTLENIKKAGLLEQDQHRADSYKKVKKIIDE
YHKAFIEKSLSNFELKYQSEDKLDSLEEYLMYYSMKRIEKTEKDKFAKIQDNLRKQIADHLKGDE
SYKTIFSKDLIRKNLPDFVKSDEERTLIKEFKDETTYFKGFYENRENMYSAEDKSTAISHRIIHE
NLPKFVDNINAFSKIILIPELREKLNQIYQDFEEYLNVESIDEIFHLDYFSMVMTQKQIEVYNAI
IGGKSTNDKKIQGLNEYINLYNQKHKDCKLPKLKLLFKQILSDRIAISWLPDNEKDDQEALDSID
TCYKNLLNDGNVLGEGNLKLLLENIDTYNLKGIFIRNDLQLTDISQKMYASWNVIQDAVILDLKK
QVSRKKKESAEDYNDRLKKLYTSQESFSIQYLNDCLRAYGKTENIQDYFAKLGAVNNEHEQTINL
FAQVRNAYTSVQAILTTPYPENANLAQDKETVALIKNLLDSLKRLQRFIKPLLGKGDESDKDERE
YGDFTPLWETLNQITPLYNMVRNYMTRKPYSQEKIKLNFENSTLLGGWDLNKEHDNTAIILRKNG
LYYLAIMKKSANKIFDKDKLDNSGDCYEKMVYKLLPGANKMLPKVFFSKSRIDEFKPSENIIENY
KKGTHKKGANENLADCHNLIDFFKSSISKHEDWSKENFHESDTSSYEDLSDFYREVEQQGYSISE
CDVSVEYINKMVEKGDLYLFQIYNKDFSEFSKGTPNMHTLYWNSLESKENLNNIIYKLNGQAEIF
FRKKSLNYKRPTHPAHQAIKNKNKCNEKKESIFDYDLVKDKRYTVDKFQFHVPITMNFKSTGNTN
INQQVIDYLRTEDDTHIIGIDRGERHLLYLVVIDSHGKIVEQFTLNEIVNEYGGNIYRTNYHDLL
DTREQNREKARESWQTIENIKELKEGYISQVIHKITDLMQKYHAVVVLEDLNMGEMRGRQKVEKQ
VYQKFEEMLINKLNYLVNKKADQNSAGGLLHAYQLTSKFESFQKLGKQSGELFYIPAWNTSKIDP
VTGFVNLEDTRYESIDKAKAFFGKEDSIRYNADKDWFEFAFDYNNFTTKAEGTRINWTICTYGSR
IRTFRNQAKNSQWDNEEIDLTKAYKAFFAKHGINIYDNIKEAIAMETEKSFFEDLLHLLKLTLQM
RNSITGTTTDYLISPVHDSKGNFYDSRICDNSLPANADANGAYNIARKGLMLIQQIKDSTSSNRF
KFSPITNKDWLIFAQEKPYLND

[0090] In certain embodiments, the type V-A Cas protein comprises PsCpf1 or a variant thereof. In certain embodiments, the type V-A Cas protein comprises an amino acid sequence at least 30%, at least 40%, at least 50%, at least 60%, at least 70%, at least 75%, at least 80%, at least 85%, at least 90%, at least 91%, at least 92%, at least 93%, at least 94%, at least 95%, at least 96%, at least 97%, at least 98%, or at least 99% identical to the amino acid sequence set forth in SEQ ID NO: 7. In certain embodiments, the type V-A Cas protein comprises the amino acid sequence set forth in SEQ ID NO: 7.

PsCpf1
(SEQ ID NO: 7)
MENFKNLYPINKTLRFELRPYGKTLENFKKSGLLEKDAFKANSRRSMQAIIDEKFKETIEERLKY
TEFSECDLGNMTSKDKKITDKAATNLKKQVILSEDDEIENNYLKPDKNIDALFKNDPSNPVISTE
KGFTTYFVNFFEIRKHIFKGESSGSMAYRIIDENLTTYLNNIEKIKKLPEELKSQLEGIDQIDKL
NNYNEFITQSGITHYNEIIGGISKSENVKIQGINEGINLYCQKNKVKLPRLTPLYKMILSDRVSN
SFVLDTIENDTELIEMISDLINKTEISQDVIMSDIQNIFIKYKQLGNLPGISYSSIVNAICSDYD
NNFGDGKRKKSYENDRKKHLETNVYSINYISELLTDTDVSSNIKMRYKELEQNYQVCKENENATN
WMNIKNIKQSEKINLIKDLLDILKSIQRFYDLEDIVDEDKNPSAEFYTWLSKNAEKLDFEENSVY
NKSRNYLTRKQYSDKKIKLNFDSPTLAKGWDANKEIDNSTIIMRKENNDRGDYDYELGIWNKSTP
ANEKIIPLEDNGLFEKMQYKLYPDPSKMLPKQFLSKIWKAKHPTTPEFDKKYKEGRHKKGPDFEK
EFLHELIDCFKHGLVNHDEKYQDVEGENLRNTEDYNSYTEFLEDVERCNYNLSENKIADTSNLIN
DGKLYVFQIWSKDESIDSKGTKNLNTIYFESLESEENMIEKMEKLSGEAEIFYRPASLNYCEDII
KKGHHHAELKDKEDYPIIKDKRYSQDKFFFHVPMVINYKSEKLNSKSLNNRTNENLGQFTHIIGI
DRGERHLIYLTVVDVSTGEIVEQKHLDEIINTDTKGVEHKTHYLNKLEEKSKTRDNERKSWEAIE
TIKELKEGYISHVINEIQKLQEKYNALIVMENLNYGFKNSRIKVEKQVYQKFETALIKKENYIID
KKDPETYIHGYQLTNPITTLDKIGNQSGIVLYIPAWNTSKIDPVTGFVNLLYADDLKYKNQEQAK
SFIQKIDNIYFENGEFKEDIDESKWNNRYSISKTKWILTSYGTRIQTERNPQKNNKWDSAEYDLT
EEFKLILNIDGTLKSQDVETYKKEMSLFKLMLQLRNSVIGTDIDYMISPVTDKTGTHEDSRENIK
NLPADADANGAYNIARKGIMAIENIMNGISDPLKISNEDYLKYIQNQQE

[0091] In certain embodiments, the type V-A Cas protein comprises As2Cpf1 or a variant thereof. In certain embodiments, the type V-A Cas protein comprises an amino acid sequence at least 30%, at least 40%, at least 50%, at least 60%, at least 70%, at least 75%, at least 80%, at least 85%, at least 90%, at least 91%, at least 92%, at least 93%, at least 94%, at least 95%, at least 96%, at least 97%, at least 98%, or at least 99% identical to the amino acid sequence set forth in SEQ ID NO: 8. In certain embodiments, the type V-A Cas protein comprises the amino acid sequence set forth in SEQ ID NO: 8.

As2Cpf1
(SEQ ID NO: 8)
MVAFIDEFVGQYPVSKTLRFEARPVPETKKWLESDQCSVLENDQKRNEYYGVLKELLDDYYRAYI
EDALTSFTLDKALLENAYDLYCNRDTNAFSSCCEKLRKDLVKAFGNLKDYLLGSDQLKDLVKLKA
KVDAPAGKGKKKIEVDSRLINWLNNNAKYSAEDREKYIKAIESFEGFVTYLTNYKQARENMESSE
DKSTAIAFRVIDQNMVTYFGNIRIYEKIKAKYPELYSALKGFEKFFSPTAYSEILSQSKIDEYNY
QCIGRPIDDADEKGVNSLINEYRQKNGIKARELPVMSMLYKQILSDRDNSEMSEVINRNEEAIEC
AKNGYKVSYALFNELLQLYKKIFTEDNYGNIYVKTQPLTELSQALFGDWSILRNALDNGKYDKDI
INLAELEKYESEYCKVLDADDAAKIQDKENLKDYFIQKNALDATLPDLDKITQYKPHLDAMLQAI
RKYKLFSMYNGRKKMDVPENGIDESNEFNAIYDKLSEFSILYDRIRNFATKKPYSDEKMKLSENM
PTMLAGWDYNNETANGCFLFIKDGKYFLGVADSKSKNIFDEKKNPHLLDKYSSKDIYYKVKYKQV
SGSAKMLPKVVFAGSNEKIFGHLISKRILEIREKKLYTAAAGDRKAVAEWIDEMKSAIAIHPEWN
EYFKFKFKNTAEYDNANKFYEDIDKQTYSLEKVEIPTEYIDEMVSQHKLYLFQLYTKDESDKKKK
KGTDNLHTMYWHGVESDENLKAVTEGTQPIIKLNGEAEMEMRNPSIEFQVTHEHNKPIANKNPLN
IKKESVENYDLIKDKRYTERKFYFHCPITLNFRADKPIKYNEKINRFVENNPDVCIIGIDRGERH
LLYYTVINQTGDILEQGSLNKISGSYTNDKGEKVNKETDYHDLLDRKEKGKHVAQQAWETIENIK
ELKAGYLSQVVYKLTQLMLQYNAVIVLENLNVGFKRGRTKVEKQVYQKFEKAMIDKLNYLVEKDR
GYEMNGSYAKGLQLTDKFESEDKIGKQTGCIYYVIPSYTSHIDPKTGFVNLLNAKLRYENITKAQ
DTIRKEDSISYNAKADYFEFAFDYRSFGVDMARNEWVVCTCGDLRWEYSAKTRETKAYSVTDRLK
ELFKAHGIDYVGGENLVSHITEVADKHELSTLLFYLRLVLKMRYTVSGTENENDFILSPVEYAPG
KFFDSREATSTEPMNADANGAYHIALKGLMTIRGIEDGKLHNYGKGGENAAWFKFMQNQEYKNNG

[0092] In certain embodiments, the type V-A Cas protein comprises McCpf1 or a variant thereof. In certain embodiments, the type V-A Cas protein comprises an amino acid sequence at least 30%, at least 40%, at least 50%, at least 60%, at least 70%, at least 75%, at least 80%, at least 85%, at least 90%, at least 91%, at least 92%, at least 93%, at least 94%, at least 95%, at least 96%, at least 97%, at least 98%, or at least 99% identical to the amino acid sequence set forth in SEQ ID NO: 9. In certain embodiments, the type V-A Cas protein comprises the amino acid sequence set forth in SEQ ID NO: 9.

McCpf1
(SEQ ID NO: 9)
MLFQDFTHLYPLSKTMRFELKPIGKTLEHIHAKNFLSQDETMADMYQKVKAILDDYHRDEIADMM
GEVKLTKLAEFYDVYLKERKNPKDDGLQKOLKDLQAVLRKEIVKPIGNGGKYKAGYDRLFGAKLE
KDGKELGDLAKFVIAQEGESSPKLAHLAHFEKFSTYFTGFHDNRKNMYSDEDKHTAITYRLIHEN
LPRFIDNLQILATIKQKHSALYDQIINELTASGLDVSLASHLDGYHKLLTQEGITAYNTLLGGIS
GEAGSRKIQGINELINSHHNQHCHKSERIAKLRPLHKQILSDGMGVSFLPSKFADDSEMCQAVNE
FYRHYADVFAKVQSLFDGFDDHQKDGIYVEHKNLNELSKQAFGDFALLGRVLDGYYVDVVNPEEN
ERFAKAKTDNAKAKLTKEKDKFIKGVHSLASLEQAIEHYTARHDDESVQAGKLGQYFKHGLAGVD
NPIQKIHNNHSTIKGFLERERPAGERALPKIKSGKNPEMTQLRQLKELLDNALNVAHFAKLLTTK
TTLDNQDGNFYGEFGALYDELAKIPTLYNKVRDYLSQKPFSTEKYKLNFGNPTLLNGWDLNKEKD
NEGIILQKDGCYYLALLDKAHKKVEDNAPNTGKNVYQKMIYKLLPGPNKMLPKVEFAKSNLDYYN
PSAELLDKYAQGTHKKGNNFNLKDCHALIDFFKAGINKHPEWQHFGFKESPTSSYQDLSDFYREV
EPQGYQVKFVDINADYINELVEQGQLYLFQIYNKDESPKAHGKPNLHTLYFKALFSKDNLANPIY
KLNGEAQIFYRKASLDMNETTIHRAGEVLENKNPDNPKKRQFVYDIIKDKRYTQDKEMLHVPITM
NFGVQGMTIKEFNKKVNQSIQQYDEVNVIGIDRGERHLLYLTVINSKGEILEQRSLNDITTASAN
GTQMTTPYHKILDKREIERLNARVGWGEIETIKELKSGYLSHVVHQISQLMLKYNAIVVLEDLNE
GFKRGRFKVEKQIYQNFENALIKKLNHLVLKDEADDEIGSYKNALQLTNNFTDLKSIGKQTGELF
YVPAWNTSKIDPETGFVDLLKPRYENIAQSQAFFGKEDKICYNADKDYFEFHIDYAKFTDKAKNS
RQIWKICSHGDKRYVYDKTANQNKGATKGINVNDELKSLFARHHINDKQPNLVMDICONNDKEFH
KSLIYLLKTLLALRYSNASSDEDFILSPVANDEGMFENSALADDTQPQNADANGAYHIALKGLWV
LEQIKNSDDLNKVKLAIDNQTWLNFAQNR

[0093] In certain embodiments, the type V-A Cas protein comprises Lb3Cpf1 or a variant thereof. In certain embodiments, the type V-A Cas protein comprises an amino acid sequence at least 30%, at least 40%, at least 50%, at least 60%, at least 70%, at least 75%, at least 80%, at least 85%, at least 90%, at least 91%, at least 92%, at least 93%, at least 94%, at least 95%, at least 96%, at least 97%, at least 98%, or at least 99% identical to the amino acid sequence set forth in SEQ ID NO: 10. In certain embodiments, the type V-A Cas protein comprises the amino acid sequence set forth in SEQ ID NO: 10.

Lb3Cpf1
(SEQ ID NO: 10)
MHENNGKIADNFIGIYPVSKTLRFELKPVGKTQEYIEKHGILDEDLKRAGDYKSVKKIIDAYHKY
FIDEALNGIQLDGLKNYYELYEKKRDNNEEKEFQKIQMSLRKQIVKRFSEHPQYKYLFKKELIKN
VLPEFTKDNAEEQTLVKSFQEFTTYFEGFHQNRKNMYSDEEKSTAIAYRVVHQNLPKYIDNMRIF
SMILNTDIRSDLTELENNLKTKMDITIVEEYFAIDGENKVVNQKGIDVYNTILGAFSTDDNTKIK
GLNEYINLYNQKNKAKLPKLKPLFKQILSDRDKISFIPEQFDSDTEVLEAVDMFYNRLLQFVIEN
EGQITISKLLTNFSAYDLNKIYVKNDTTISAISNDLEDDWSYISKAVRENYDSENVDKNKRAAAY
EEKKEKALSKIKMYSIEELNFFVKKYSCNECHIEGYFERRILEILDKMRYAYESCKILHDKGLIN
NISLCQDRQAISELKDELDSIKEVQWLLKPLMIGQEQADKEEAFYTELLRIWEELEPITLLYNKV
RNYVTKKPYTLEKVKLNFYKSTLLDGWDKNKEKDNLGIILLKDGQYYLGIMNRRNNKIADDAPLA
KTDNVYRKMEYKLLTKVSANLPRIFLKDKYNPSEEMLEKYEKGTHLKGENFCIDDCRELIDEFKK
GIKQYEDWGQFDFKESDTESYDDISAFYKEVEHOGYKITFRDIDETYIDSLVNEGKLYLFQIYNK
DESPYSKGTKNLHTLYWEMLESQQNLQNIVYKLNGNAEIFYRKASINQKDVVVHKADLPIKNKDP
QNSKKESMEDYDIIKDKRFTCDKYQFHVPITMNFKALGENHENRKVNRLIHDAENMHIIGIDRGE
RNLIYLCMIDMKGNIVKQISLNEIISYDKNKLEHKRNYHQLLKTREDENKSARQSWQTIHTIKEL
KEGYLSQVIHVITDLMVEYNAIVVLEDLNFGFKQGRQKFERQVYQKFEKMLIDKLNYLVDKSKGM
DEDGGLLHAYQLTDEFKSFKQLGKQSGFLYYIPAWNTSKLDPTTGFVNLFYTKYESVEKSKEFIN
NFTSILYNQEREYFEFLEDYSAFTSKAEGSRLKWTVCSKGERVETYRNPKKNNEWDTQKIDLIFE
LKKLFNDYSISLLDGDLREQMGKIDKADFYKKEMKLFALIVQMRNSDEREDKLISPVLNKYGAFF
ETGKNERMPLDADANGAYNIARKGLWIIEKIKNTDVEQLDKVKLTISNKEWLQYAQEHIL

[0094] In certain embodiments, the type V-A Cas protein comprises EcCpf1 or a variant thereof. In certain embodiments, the type V-A Cas protein comprises an amino acid sequence at least 30%, at least 40%, at least 50%, at least 60%, at least 70%, at least 75%, at least 80%, at least 85%, at least 90%, at least 91%, at least 92%, at least 93%, at least 94%, at least 95%, at least 96%, at least 97%, at least 98%, or at least 99% identical to the amino acid sequence set forth in SEQ ID NO: 11. In certain embodiments, the type V-A Cas protein comprises the amino acid sequence set forth in SEQ ID NO: 11.

EcCpf1
(SEQ ID NO: 11)
MDFFKNDMYFLCINGIIVISKLFAYLFLMYKRGVVMIKDNFVNVY
SLSKTIRMALIPWGKTEDNEYKKELLEEDEERAKNYIKVKGYMDE
YHKNFIESALNSVVLNGVDEYCELYFKQNKSDSEVKKIESLEASM
RKQISKAMKEYTVDGVKIYPLLSKKEFIRELLPEFLTQDEEIETL
EQENDESTYFQGEWENRKNIYTDEEKSTGVPYRCINDNLPKFLDN
VKSFEKVILALPQKAVDELNANENGVYNVDVQDVESVDYFNFVLS
QSGIEKYNNIIGGYSNSDASKVQGLNEKINLYNQQIAKSDKSKKL
PLLKPLYKQILSDRSSLSFIPEKFKDDNEVLNSINVLYDNIAESL
EKANDLMSDIANYNTDNIFISSGVAVTDISKKVFGDWSLIRNNWN
DEYESTHKKGKNEEKFYEKEDKEFKKIKSFSVSELQRLANSDLSI
VDYLVDESASLYADIKTAYNNAKDLLSNEYSHSKRLSKNDDAIEL
IKSELDSIKNYEAFLKPLCGTGKEESKDNAFYGAFLECFEEIRQV
DAVYNKVRNHITQKPYSNDKIKLNFQNPQFLAGWDKNKERAYRSV
LLRNGEKYYLAIMEKGKSKLFEDEPEDESSPFEKIDYKLLPEPSK
MLPKVFFATSNKDLENPSDEILNIRATGSFKKGDSENLDDCHKFI
DFYKASIENHPDWSKEDEDESETNDYEDISKFFKEVSDQGYSIGY
RKISESYLEEMVDNGSLYMFQLYNKDESENRKSKGTPNLHTLYFK
MLEDERNLEDVVYKLSGGAEMFYRKPSIDKNEMIVHPKNQPIDNK
NPNNVKKTSTFEYDIVKDMRYTKPQFQLHLPIVLNFKANSKGYIN
DDVRNVLKNSEDTYVIGIDRGERNLVYACVVDGNGKLVEQVPLNV
IEADNGYKTDYHKLLNDREEKRNEARKSWKTIGNIKELKEGYISQ
VVHKICQLVVKYDAVIAMEDLNSGFVNSRKKVEKQVYQKFERMLT
QKLNYLVDKKLDPNEMGGLLNAYQLTNEATKVRNGRQDGIIFYIP
AWLTSKIDPTTGFVNLLKPKYNSVSASKEFFSKEDEIRYNEKENY
FEFSENYDNEPKCNADEKREWTVCTYGDRIRTFRDPENNNKENSE
VVVLNDEFKNLFVEFDIDYTDNLKEQILAMDEKSFYKKLMGLLSL
TLQMRNSISKNVDVDYLISPVKNSNGEFYDSRNYDITSSLPCDAD
SNGAYNIARKGLWAINQIKQADDETKANISIKNSEWLQYAQNCDE
V

[0095] In certain embodiments, the type V-A Cas protein is not Cpf1. In certain embodiments, the type V-A Cas nuclease is not AsCpf1.

[0096] In certain embodiments, the type V-A Cas protein comprises MAD1, MAD2, MAD3, MAD4, MAD5, MAD6, MAD7, MAD8, MAD9, MAD10, MAD11, MAD12, MAD13, MAD14, MAD15, MAD16, MAD17, MAD18, MAD19, or MAD20, or variants thereof. MAD1-MAD20 are known in the art and are described in U.S. Pat. No. 9,982,279.

[0097] In certain embodiments, the type V-A Cas protein comprises MAD7 or a variant thereof. In certain embodiments, the type V-A Cas protein comprises an amino acid sequence at least 30%, at least 40%, at least 50%, at least 60%, at least 70%, at least 75%, at least 80%, at least 85%, at least 90%, at least 91%, at least 92%, at least 93%, at least 94%, at least 95%, at least 96%, at least 97%, at least 98%, or at least 99% identical to the amino acid sequence set forth in SEQ ID NO: 1. In certain embodiments, the type V-A Cas protein comprises the amino acid sequence set forth in SEQ ID NO: 1.

MAD7
(SEQ ID NO: 1)
MNNGTNNFQNFIGISSLQKTLRNALIPTETTQQFIVKNGIIKEDE
LRGENRQILKDIMDDYYRGEISETLSSIDDIDWTSLFEKMEIQLK
NGDNKDTLIKEQTEYRKAIHKKFANDDRFKNMESAKLISDILPEF
VIHNNNYSASEKEEKTQVIKLESRFATSFKDYFKNRANCESADDI
SSSSCHRIVNDNAEIFFSNALVYRRIVKSLSNDDINKISGDMKDS
LKEMSLEEIYSYEKYGEFITQEGISFYNDICGKVNSEMNLYCQKN
KENKNLYKLQKLHKQILCIADTSYEVPYKFESDEEVYQSVNGELD
NISSKHIVERLRKIGDNYNGYNLDKIYIVSKFYESVSQKTYRDWE
TINTALEIHYNNILPGNGKSKADKVKKAVKNDLQKSITEINELVS
NYKLCSDDNIKAETYIHEISHILNNFEAQELKYNPEIHLVESELK
ASELKNVLDVIMNAFHWCSVEMTEELVDKDNNFYAELEEIYDEIY
PVISLYNLVRNYVTQKPYSTKKIKLNEGIPTLADGWSKSKEYSNN
AIILMRDNLYYLGIFNAKNKPDKKIIEGNTSENKGDYKKMIYNLL
PGPNKMIPKVFLSSKTGVETYKPSAYILEGYKQNKHIKSSKDEDI
TECHDLIDYFKNCIAIHPEWKNFGEDESDTSTYEDISGFYREVEL
QGYKIDWTYISEKDIDLLQEKGQLYLFQIYNKDESKKSTGNDNLH
TMYLKNLFSEENLKDIVLKLNGEAEIFFRKSSIKNPIIHKKGSIL
VNRTYEAEEKDQFGNIQIVRKNIPENIYQELYKYFNDKSDKELSD
EAAKLKNVVGHHEAATNIVKDYRYTYDKYELHMPITINFKANKTG
FINDRILQYIAKEKDLHVIGIDRGERNLIYVSVIDTCGNIVEQKS
ENIVNGYDYQIKLKQQEGARQIARKEWKEIGKIKEIKEGYLSLVI
HEISKMVIKYNAIIAMEDLSYGEKKGREKVERQVYQKFETMLINK
LNYLVEKDISITENGGLLKGYQLTYIPDKLKNVGHQCGCIFYVPA
AYTSKIDPTTGFVNIFKFKDLTVDAKREFIKKEDSIRYDSEKNLF
CFTEDYNNFITQNTVMSKSSWSVYTYGVRIKRRFVNGRESNESDT
IDITKDMEKTLEMTDINWRDGHDLRQDIIDYEIVQHIFEIFRLTV
QMRNSLSELEDRDYDRLISPVLNENNIFYDSAKAGDALPKDADAN
GAYCIALKGLYEIKQITENWKEDGKFSRDKLKISNKDWEDFIQNK
RYL

[0098] In certain embodiments, the type V-A Cas protein comprises MAD2 or a variant thereof. In certain embodiments, the type V-A Cas protein comprises an amino acid sequence at least 30%, at least 40%, at least 50%, at least 60%, at least 70%, at least 75%, at least 80%, at least 85%, at least 90%, at least 91%, at least 92%, at least 93%, at least 94%, at least 95%, at least 96%, at least 97%, at least 98%, or at least 99% identical to the amino acid sequence set forth in SEQ ID NO: 2. In certain embodiments, the type V-A Cas protein comprises the amino acid sequence set forth in SEQ ID NO: 2.

MAD2
(SEQ ID NO: 2)
MSSLTKFTNKYSKQLTIKNELIPVGKTLENIKENGLIDGDEQLNE
NYQKAKIIVDDELRDFINKALNNTQIGNWRELADALNKEDEDNIE
KLQDKIRGIIVSKFETFDLESSYSIKKDEKIIDDDNDVEEEELDL
GKKTSSFKYIFKKNLFKLVLPSYLKTTNQDKLKIISSEDNESTYF
RGFFENRKNIFTKKPISTSIAYRIVHDNFPKELDNIRCENVWQTE
CPQLIVKADNYLKSKNVIAKDKSLANYFTVGAYDYFLSQNGIDFY
NNIIGGLPAFAGHEKIQGLNEFINQECQKDSELKSKLKNRHAFKM
AVLFKQILSDREKSFVIDEFESDAQVIDAVKNFYAEQCKDNNVIE
NLLNLIKNIAFLSDDELDGIFIEGKYLSSVSQKLYSDWSKLRNDI
EDSANSKQGNKELAKKIKINKGDVEKAISKYEFSLSELNSIVHDN
TKESDLLSCTLHKVASEKLVKVNEGDWPKHLKNNEEKQKIKEPLD
ALLEIYNTLLIFNCKSENKNGNFYVDYDRCINELSSVVYLYNKTR
NYCTKKPYNTDKFKLNENSPQLGEGESKSKENDCLTLLEKKDDNY
YVGIIRKGAKINFDDTQAIADNTDNCIFKMNYFLLKDAKKFIPKC
SIQLKEVKAHEKKSEDDYILSDKEKFASPLVIKKSTFLLATAHVK
GKKGNIKKFQKEYSKENPTEYRNSLNEWIAFCKEFLKTYKAATIF
DITTLKKAEEYADIVEFYKDVDNLCYKLEFCPIKTSFIENLIDNG
DLYLFRINNKDESSKSTGTKNLHTLYLQAIFDERNLNNPTIMLNG
GAELFYRKESIEQKNRITHKAGSILVNKVCKDGTSLDDKIRNEIY
QYENKFIDTLSDEAKKVLPNVIKKEATHDITKDKRFTSDKFFFHC
PLTINYKEGDTKQFNNEVLSFLRGNPDINIIGIDRGERNLIYVTV
INQKGEILDSVSENTVINKSSKIEQTVDYEEKLAVREKERIEAKR
SWDSISKIATLKEGYLSAIVHEICLLMIKHNAIVVLENLNAGFKR
IRGGLSEKSVYQKFEKMLINKLNYFVSKKESDWNKPSGLLNGLQL
SDQFESFEKLGIQSGFIFYVPAAYTSKIDPTTGFANVLNLSKVRN
VDAIKSFFSNFNEISYSKKEALFKFSEDLDSLSKKGFSSFVKESK
SKWNVYTFGERIIKPKNKQGYREDKRINLTFEMKKLLNEYKVSED
LENNLIPNLTSANLKDTFWKELFFIFKTTLQLRNSVINGKEDVLI
SPVKNAKGEFFVSGTHNKTLPQDCDANGAYHIALKGLMILERNNL
VREEKDTKKIMAISNVDWFEYVQKRRGVL

[0099] In certain embodiments, the type V-A Cas protein comprises Csm1. Csm1 proteins are known in the art and are described in U.S. Pat. No. 9,896,696. Csm1 orthologs can be found in various bacterial and archaeal genomes. For example, in certain embodiments, the Csm1 protein is derived from Smithella sp. SCADC (Sm), Sulfuricurvum sp. (Ss), or Microgenomates (Roizmanbacteria) bacterium (Mb).

[0100] In certain embodiments, the type V-A Cas protein comprises SmCsm1 or a variant thereof. In certain embodiments, the type V-A Cas protein comprises an amino acid sequence at least 30%, at least 40%, at least 50%, at least 60%, at least 70%, at least 75%, at least 80%, at least 85%, at least 90%, at least 91%, at least 92%, at least 93%, at least 94%, at least 95%, at least 96%, at least 97%, at least 98%, or at least 99% identical to the amino acid sequence set forth in SEQ ID NO: 12. In certain embodiments, the type V-A Cas protein comprises the amino acid sequence set forth in SEQ ID NO: 12.

SmCsm1
(SEQ ID NO: 12)
MEKYKITKTIRFKLLPDKIQDISRQVAVLQNSTNAEKKNNLLRLV
QRGQELPKLLNEYIRYSDNHKLKSNVTVHFRWLRLFTKDLFYNWK
KDNTEKKIKISDVVYLSHVFEAFLKEWESTIERVNADCNKPEESK
TRDAEIALSIRKLGIKHQLPFIKGFVDNSNDKNSEDTKSKLTALL
SEFEAVLKICEQNYLPSQSSGIAIAKASFNYYTINKKQKDFEAEI
VALKKQLHARYGNKKYDQLLRELNLIPLKELPLKELPLIEFYSEI
KKRKSTKKSEFLEAVSNGLVEDDLKSKFPLFQTESNKYDEYLKLS
NKITQKSTAKSLLSKDSPEAQKLQTEITKLKKNRGEYFKKAFGKY
VQLCELYKEIAGKRGKLKGQIKGIENERIDSQRLQYWALVLEDNL
KHSLILIPKEKTNELYRKVWGAKDDGASSSSSSTLYYFESMTYRA
LRKLCFGINGNTFLPEIQKELPQYNQKEFGEFCFHKSNDDKEIDE
PKLISFYQSVLKTDFVKNTLALPQSVENEVAIQSFETRQDFQIAL
EKCCYAKKQIISESLKKEILENYNTQIFKITSLDLQRSEQKNLKG
HTRIWNRFWTKQNEEINYNLRLNPEIAIVWRKAKKTRIEKYGERS
VLYEPEKRNRYLHEQYTLCTTVTDNALNNEITFAFEDTKKKGTEI
VKYNEKINQTLKKEFNKNQLWFYGIDAGEIELATLALMNKDKEPQ
LFTVYELKKLDFFKHGYIYNKERELVIREKPYKAIQNLSYFLNEE
LYEKTERDGKENETYNELFKEKHVSAIDLTTAKVINGKIILNGDM
ITELNLRILHAQRKIYEELIENPHAELKEKDYKLYFEIEGKDKDI
YISRLDFEYIKPYQEISNYLFAYFASQQINEAREEEQINQTKRAL
AGNMIGVIYYLYQKYRGIISIEDLKQTKVESDRNKFEGNIERPLE
WALYRKFQQEGYVPPISELIKLRELEKEPLKDVKQPKYENIQQFG
IIKFVSPEETSTTCPKCLRRFKDYDKNKQEGFCKCQCGEDTRNDL
KGFEGLNDPDKVAAFNIAKRGFEDLQKYK

[0101] In certain embodiments, the type V-A Cas protein comprises SsCsm1 or a variant thereof. In certain embodiments, the type V-A Cas protein comprises an amino acid sequence at least 30%, at least 40%, at least 50%, at least 60%, at least 70%, at least 75%, at least 80%, at least 85%, at least 90%, at least 91%, at least 92%, at least 93%, at least 94%, at least 95%, at least 96%, at least 97%, at least 98%, or at least 99% identical to the amino acid sequence set forth in SEQ ID NO: 13. In certain embodiments, the type V-A Cas protein comprises the amino acid sequence set forth in SEQ ID NO: 13.

SsCsm1
(SEQ ID NO: 13)
MLHAFTNQYQLSKTLRFGATLKEDEKKCKSHEELKGFVDISYENM
KSSATIAESLNENELVKKCERCYSEIVKFHNAWEKIYYRTDQIAV
YKDFYRQLSRKARFDAGKQNSQLITLASLCGMYQGAKLSRYITNY
WKDNITRQKSFLKDESQQLHQYTRALEKSDKAHTKPNLINENKTE
MVLANLVNEIVIPLSNGAISFPNISKLEDGEESHLIEFALNDYSQ
LSELIGELKDAIATNGGYTPFAKVTLNHYTAEQKPHVFKNDIDAK
IRELKLIGLVETLKGKSSEQIEEYESNLDKESTYNDRNQSVIVRT
QCFKYKPIPELVKHQLAKYISEPNGWDEDAVAKVLDAVGAIRSPA
HDYANNQEGFDLNHYPIKVAFDYAWEQLANSLYTTVTFPQEMCEK
YLNSIYGCEVSKEPVFKFYADLLYIRKNLAVLEHKNNLPSNQEEF
ICKINNTFENIVLPYKISQFETYKKDILAWINDGHDHKKYTDAKQ
QLGFIRGGLKGRIKAEEVSQKDKYGKIKSYYENPYTKLINEFKQI
SSTYGKTFAELRDKEKEKNEITKITHEGIIIEDKNRDRYLLASEL
KHEQINHVSTILNKLDKSSEFITYQVKSLTSKTLIKLIKNHTTKK
GAISPYADFHTSKTGENKNEIEKNWDNYKREQVLVEYVKDCLTDS
TMAKNQNWAEFGWNFEKCNSYEDIEHEIDQKSYLLQSDTISKQSI
ASLVEGGCLLLPIINQDITSKERKDKNQFSKDWNHIFEGSKEFRL
HPEFAVSYRTPIEGYPVQKRYGRLQFVCAFNAHIVPQNGEFINLK
KQIENENDEDVQKRNVTEENKKVNHALSDKEYVVIGIDRGLKQLA
TLCVLDKRGKILGDFEIYKKEFVRAEKRSESHWEHTQAETRHILD
LSNLRVETTIEGKKVLVDQSLTLVKKNRDTPDEEATEENKQKIKL
KQLSYIRKLQHKMQTNEQDVLDLINNEPSDEEFKKRIEGLISSFG
EGQKYADLPINTMREMISDLQGVIARGNNQTEKNKIIELDAADNL
KQGIVANMIGIVNYIFAKYSYKAYISLEDLSRAYGGAKSGYDGRY
LPSTSQDEDVDFKEQQNQMLAGLGTYQFFEMQLLKKLQKIQSDNT
VLRFVPAFRSADNYRNILRLEETKYKSKPFGVVHFIDPKFTSKKC
PVCSKTNVYRDKDDILVCKECGFRSDSQLKERENNIHYIHNGDDN
GAYHIALKSVENLIQMK

[0102] In certain embodiments, the type V-A Cas protein comprises MbCsm1 or a variant thereof. In certain embodiments, the type V-A Cas protein comprises an amino acid sequence at least 30%, at least 40%, at least 50%, at least 60%, at least 70%, at least 75%, at least 80%, at least 85%, at least 90%, at least 91%, at least 92%, at least 93%, at least 94%, at least 95%, at least 96%, at least 97%, at least 98%, or at least 99% identical to the amino acid sequence set forth in SEQ ID NO: 14. In certain embodiments, the type V-A Cas protein comprises the amino acid sequence set forth in SEQ ID NO: 14.

MbCsm1
(SEQ ID NO: 14)
MEIQELKNLYEVKKTVRFELKPSKKKIFEGGDVIKLQKDFEKVQK
FFLDIFVYKNEHTKLEFKKKREIKYTWLRTNTKNEFYNWRGKSDT
GKNYALNKIGFLAEEILRWLNEWQELTKSLKDLTQREEHKQERKS
DIAFVLRNELKRQNLPFIKDFFNAVIDIQGKQGKESDDKIRKFRE
EIKEIEKNLNACSREYLPTQSNGVLLYKASFSYYTLNKTPKEYED
LKKEKESELSSVLLKEIYRRKRENRTTNQKDTLFECTSDWLVKIK
LGKDIYEWTLDEAYQKMKIWKANQKSNFIEAVAGDKLTHQNFRKQ
FPLEDASDEDFETFYRLTKALDKNPENAKKIAQKRGKFFNAPNET
VQTKNYHELCELYKRIAVKRGKIIAEIKGIENEEVQSQLLTHWAV
IAEERDKKFIVLIPRKNGGKLENHKNAHAFLQEKDRKEPNDIKVY
HFKSLTLRSLEKLCFKEAKNTFAPEIKKETNPKIWFPTYKQEWNS
TPERLIKFYKQVLQSNYAQTYLDLVDEGNLNTFLETHFTTLEEFE
SDLEKTCYTKVPVYFAKKELETFADEFEAEVFEITTRSISTESKR
KENAHAEIWRDEWSRENEEENHITRLNPEVSVLYRDEIKEKSNTS
RKNRKSNANNRESDPRETLATTITLNADKKKSNLAFKTVEDINIH
IDNENKKESKNESGEWVYGIDRGLKELATLNVVKESDVKNVFGVS
QPKEFAKIPIYKLRDEKAILKDENGLSLKNAKGEARKVIDNISDV
LEEGKEPDSTLFEKREVSSIDLTRAKLIKGHIISNGDQKTYLKLK
ETSAKRRIFELFSTAKIDKSSQFHVRKTIELSGTKIYWLCEWQRQ
DSWRTEKVSLRNTLKGYLQNLDLKNRFENIETIEKINHLRDAITA
NMVGILSHLQNKLEMQGVIALENLDTVREQSNKKMIDEHFEQSNE
HVSRRLEWALYCKFANTGEVPPQIKESIFLRDEFKVCQIGILNFI
DVKGTSSNCPNCDQESRKTGSHFICNFQNNCIFSSKENRNLLEQN
LHNSDDVAAFNIAKRGLEIVKV

[0103] In certain embodiments, the type V-A Cas nuclease comprises an ART nuclease or a variant thereof. In general, such nucleases sequences have <60% AA sequence similarity to Cas12a, <60% AA sequence similarity to a positive control nuclease, and >80% query cover. In certain embodiments, the Type V-A nuclease comprises an ART1, ART2, ART3, ART4, ART5, ART6, ART7, ART8, ART9, ART10, ART11, ART12, ART13, ART14, ART15, ART16, ART17, ART18, ART19, ART20, ART21, ART22, ART23, ART24, ART25, ART26, ART27, ART28, ART28, ART30, ART31, ART32, ART33, ART34, ART35, or ART11* (i.e., ART11_L679F, i.e., ART11 wherein leucine (L) at amino acid position 679 is replaced with phenylalanine (F)) nuclease, as shown in Table 10. In certain embodiments, the type V-A Cas protein comprises an amino acid sequence at least 30%, at least 40%, at least 50%, at least 60%, at least 70%, at least 75%, at least 80%, at least 85%, at least 90%, at least 91%, at least 92%, at least 93%, at least 94%, at least 95%, at least 96%, at least 97%, at least 98%, or at least 99% identical to the amino acid sequence designated for the individual ART nuclease as shown in Table 10. In certain embodiments, provided is a nucleic acid-guided nuclease comprising a nucleic acid-guided nuclease polypeptide having at least 85% identity to an amino acid sequence represented by SEQ ID NOs: 950-984 or a nucleic acid encoding a nucleic acid-guided nuclease polypeptide comprising at least 85% identity with the polynucleotide represented by SEQ ID NOs: 808-949. In certain embodiments, provided is a nucleic acid-guided nuclease comprising a polypeptide having at least 90% identity to the amino acid sequence represented by SEQ ID NOs: 950-958, 968-970, 972, 973, 976, 978-982, or 984, wherein the polypeptide does not contain a peptide motif of YLFQIYNKDF (SEQ ID NO: 806). In certain embodiments, provided is a nucleic acid-guided nuclease comprising a nucleic acid encoding a polypeptide having at least 90% identity to nucleic acids represented by SEQ ID NOs: 808-845 wherein an encoded polypeptide does not contain a peptide motif of YLFQIYNKDF (SEQ ID NO: 806). In certain embodiments, provided is a nucleic acid-guided nuclease wherein the polypeptide comprises at least 90% identity with the amino acid sequence represented by SEQ ID NOs: 950, 951, 954, 955, 957, or 958. In certain embodiments, provided is a nucleic acid-guided nuclease, wherein the polypeptide comprises a polypeptide comprising at least 90% identity with the amino acid sequence represented by SEQ ID NO: 951.

TABLE 10
Exemplary ART nucleases

| | | SEQ ID | SEQ ID | | |
|---|---|---|---|---|---|
| | | NO | NO | | % AA |
| | | corre- | corre- | | to |
| | | sponding | sponding | % AA | positive |
| | Protein | to Amino | to nucleic | to Cpf1 | control |
| ART | Reference | Acid | acid | (<80% | (<60% |
| Name | Number | sequences | sequence | desired) | desired) |
| ART1 | WP_118425113.1 | 950 | 808 | 30.838 | 32.54 |
| ART2 | WP_137013028.1 | 951 | 812 | 34.189 | 33.07 |
| ART3 | WP_073043853.1 | 952 | 818 | 35.982 | 36.72 |
| ART4 | WP_118734405.1 | 953 | 822 | 30.519 | 51.64 |
| ART5 | WP_146683785.1 | 954 | 826 | 30.114 | 32.31 |
| ART6 | WP_117882263.1 | 955 | 830 | 29.421 | 33.49 |
| ART7 | OYP43732.1 | 956 | 834 | 26.323 | 28.64 |
| ART8 | TSC78600.1 | 957 | 838 | 25.379 | 23.01 |
| ART9 | WP_094390816.1 | 958 | 842 | 26.323 | 28.62 |
| ART10 | WP_104505765.1 | 959 | 846 | 31.291 | 32.59 |
| ART11 | WP_151622887.1 | 960 | 850 | 30.654 | 35.55 |
| ART12 | HAW84277.1 | 961 | 854 | 34.872 | 31.33 |
| ART13 | WP_119227726.1 | 962 | 858 | 34.993 | 31.55 |
| ART14 | WP_118080156.1 | 963 | 862 | 32.551 | 35.33 |
| ART15 | WP_046700744.1 | 964 | 866 | 31.456 | 33.92 |
| ART16 | WP_115247861.1 | 965 | 870 | 31.136 | 34.25 |
| ART17 | WP_062499108.1 | 966 | 874 | 31.136 | 34.17 |
| ART18 | WP_154326953.1 | 967 | 878 | 31.113 | 33.28 |
| ART19 | WP_117747221.1 | 968 | 882 | 30.764 | 32.47 |
| ART20 | WP_118211091.1 | 969 | 886 | 30.986 | 32.29 |
| ART21 | WP_118163031.1 | 970 | 890 | 31.134 | 32.54 |
| ART22 | WP_115006085.1 | 971 | 894 | 30.044 | 31.55 |
| ART23 | HCS95801.1 | 972 | 898 | 30.37 | 51.64 |
| ART24 | WP_089541090.1 | 973 | 902 | 30.933 | 33.11 |
| ART25 | WP_120123115.1 | 974 | 906 | 29.978 | 48.88 |
| ART26 | WP_117874294.1 | 975 | 910 | 29.904 | 48.49 |
| ART27 | WP_117951432.1 | 976 | 904 | 29.421 | 33.03 |
| ART28 | WP_108977930.1 | 977 | 918 | 32.099 | 32.69 |
| ART29 | WP_117886476.1 | 978 | 922 | 29.643 | 33.41 |
| ART30 | WP_101070975.1 | 979 | 926 | 29.027 | 32.95 |
| ART31 | WP_117949317.1 | 980 | 930 | 29.198 | 33.18 |
| ART32 | WP_118128310.1 | 981 | 934 | 29.198 | 33.18 |
| ART33 | WP_138157649.1 | 982 | 938 | 27.273 | 29.89 |
| ART34 | WP_135764749.1 | 983 | 942 | 27.004 | 25 |
| ART35 | OYP46450.1 | 984 | 946 | 26.709 | 29.51 |

[0104] In certain embodiments, the type V-A Cas nuclease comprises an ABW nuclease or a variant thereof. See International (PCT) Publication No. WO2021/108324. Exemplary amino acid and nucleic acid sequences are shown in Table 11. In certain embodiments, the Type V-A nuclease comprises an ABW1, ABW2, ABW3, ABW4, ABW5, ABW6, ABW7, ABW8, or ABW9 nuclease, as shown in Table 11. In certain embodiments, the type V-A Cas protein comprises an amino acid sequence at least 30%, at least 40%, at least 50%, at least 60%, at least 70%, at least 75%, at least 80%, at least 85%, at least 90%, at least 91%, at least 92%, at least 93%, at least 94%, at least 95%, at least 96%, at least 97%, at least 98%, or at least 99% identical to the amino acid sequence designated for the individual ABW nuclease as shown in Table 11.

TABLE 11
Sequences of exemplary engineered ABW nucleases

| | Engineered | |
|---|---|---|
| | Amino Acid | Engineered |
| | Sequence | Nucleotide Sequence |
| ABW1 | MGHHHHHHSSGLVPRGSG | ATGGGCCACCATCATCATCATCATAGCAGCGGCCTG |
| | TMAAFDKFIHQYQVSKTL | GTGCCGCGCGGCAGCGGTACCATGGCGGCGTTCGAT |
| | RFALIPQGKTLENTKNNV | AAGTTCATCCATCAATATCAAGTAAGCAAAACCCTC |
| | LQEDDERQKNYEKVKPIL | CGTTTTGCACTTATTCCGCAGGGGAAAACCTTGGAG |
| | DRIYKVFAEESLKDCSVD | AATACAAAAAATAACGTACTCCAGGAAGATGATGAG |
| | WNDLNACLDAYQKNPSAD | CGTCAGAAAAATTACGAAAAAGTCAAACCTATCCTT |
| | KRQKVKAAQDALRDEIAG | GATCGTATTTATAAGGTATTCGCTGAGGAAAGCCTG |
| | YFTGKQYANGKNKNAVKE | AAAGATTGCAGCGTTGACTGGAATGACCTCAATGCA |
| | KEQAELYKDIFSKKIFDG | TGTCTGGATGCTTACCAAAAAAATCCTAGCGCGGAT |
| | TVTNNKLPQVNLSAEETE | AAGCGTCAGAAGGTGAAAGCCGCGCAGGACGCGTTG |
| | LLGCFDKFTTYFVGFYQN | CGGGACGAAATTGCCGGTTATTTTACAGGGAAACAA |
| | RENVESGEDIATAIPHRI | TACGCGAACGGGAAGAACAAAAATGCCGTTAAGGAG |
| | VQDNFPKFRENCRIYQDL | AAAGAGCAGGCAGAATTGTATAAGGATATCTTTAGC |
| | IKNEPALKPLLQQAAAAV | AAAAAGATCTTTGATGGGACCGTAACGAACAACAAA |
| | MAQNPKGIYQPRKSLDDI | TTGCCACAGGTCAACCTTTCAGCCGAAGAAACAGAG |
| | FVIPFYNHLLLQDDIDYF | TTATTAGGCTGTTTTGATAAATTCACAACATATTTC |
| | NQILGGISGAAGQKKIQG | GTCGGCTTTTACCAGAACCGTGAGAACGTATTTTCA |
| | LNETINLFMQQHPQEADK | GGGGAGGATATTGCTACAGCTATTCCGCATCGGATC |
| | LKKKKIRHRFIPLYKQIL | GTCCAGGATAATTTTCCTAAATTCCGGGAAAACTGT |
| | SDRTSFSFIPEAFSNSQE | CGGATTTATCAGGACTTAATCAAAAATGAACCTGCC |
| | ALDGIETFKKSLKKNDTE | CTTAAACCGCTGCTTCAGCAAGCAGCGGCCGCGGTG |
| | GALERLIQNLASLDLKYV | ATGGCCCAGAATCCAAAGGGGATCTATCAACCACGT |
| | YLSNKKVNEISQALYGEW | AAGAGTCTGGACGATATTTTTGTCATTCCGTTTTAT |
| | HCIQDVLKQDESLESLIQ | AACCATCTCCTCTTACAGGATGATATTGATTATTTC |
| | INPQNSSNGFLATLTDEG | AATCAAATCTTAGGCGGCATTTCGGGGGCAGCCGGT |
| | KKRISQCRNVLGNPLPVK | CAGAAAAAAATCCAGGGTTTAAATGAAACAATTAAT |
| | LADDQDKAQVKNQLDTLL | CTGTTTATGCAACAGCACCCACAAGAAGCCGATAAG |
| | AAVHYLEWFKADPDLETD | TTAAAGAAAAAAAAGATTCGTCATCGGTTTATTCCG |
| | PNFTVPFEKIWEELVPLL | CTGTATAAACAAATTCTCTCTGACCGTACGTCTTTC |
| | SLYSKVRNFVTKKPYSTA | TCGTTCATCCCTGAAGCTTTTTCCAATTCTCAGGAA |
| | KFKLNFANPTLADGWDIH | GCGTTAGACGGCATTGAGACATTCAAAAAGTCTCTT |
| | KESDNGALLFEKGGLYYL | AAGAAGAATGACACATTCGGCGCGTTGGAGCGGCTG |
| | GIMNPKDKPNFKSYQGAE | ATTCAAAATCTTGCTTCCCTGGACCTGAAATACGTG |
| | PYYQKMVYRFFPDCSKTI | TATTTATCGAACAAGAAGGTCAATGAGATTTCGCAG |
| | PKCSTQRKDVKKYFEDHP | GCATTATACGGCGAATGGCACTGCATCCAAGACGTC |
| | QATSYQIHDSKKEKFRQD | CTCAAGCAAGATTTCAGCCTTGAGAGCCTGATCCAG |
| | FFEIPREIYELNNTTYGT | ATCAACCCACAAAATTCTAGCAATGGTTTCCTGGCC |
| | GKSKYKKFQTQYYQKTQD | ACACTTACCGACGAAGGCAAGAAACGTATCTCCCAA |
| | KSGYQKALRKWIDESKKF | TGTCGTAACGTACTGGGGAATCCTCTTCCAGTCAAG |
| | LQTYVSTSIFDEKGLRPS | CTTGCGGATGATCAAGACAAAGCGCAAGTCAAAAAC |
| | KDYQDLGEFYKDVNSRCY | CAATTGGATACATTACTGGCTGCTGTACACTATCTC |
| | RVTFEKIRVQDIHEAVKN | GAGTGGTTCAAGGCAGATCCAGACCTGGAAACAGAC |
| | GQLYLFQLYNKDESPKSH | CCTAACTTCACTGTTCCTTTCGAAAAGATCTGGGAG |
| | GLPNLHTLYWKAVEDPEN | GAATTGGTTCCTTTACTTTCACTGTACTCTAAAGTT |
| | LKDPIVKLNGQAELFYRP | CGGAATTTTGTTACAAAGAAGCCATATTCTACAGCT |
| | KSNMQIIQHKTGEEIVNK | AAATTTAAACTGAACTTTGCTAACCCGACATTAGCG |
| | KLKDGTPVPDDIYREISA | GATGGGTGGGATATTCACAAGGAAAGTGATAACGGC |
| | YVQGKCQGNLSPEAEKWL | GCGCTCCTGTTTGAAAAGGGTGGTTTGTATTACTTG |
| | PSVTIKKAAHDITKDRRF | GGTATCATGAACCCTAAAGATAAGCCTAATTTTAAA |
| | TEDKFFFHVPITLNYQSS | TCCTATCAGGGTGCAGAGCCATACTATCAGAAGATG |
| | GKPTAFNSQVNDELTEHP | GTGTACCGTTTTTTTCCTGACTGTTCGAAGACCATC |
| | ETNIIGIDRGERNLIYAV | CCAAAATGCAGCACCCAACGTAAGGATGTAAAAAAG |
| | VITPDGKILEQKSENVIH | TACTTCGAAGACCACCCTCAAGCGACCTCATACCAG |
| | DEDYHESLSQREKQRVAA | ATCCACGACTCAAAGAAAGAGAAGTTTCGTCAGGAT |
| | RQAWTAIGRIKDLKEGYL | TTTTTTGAGATCCCTCGGGAGATTTACGAGCTTAAT |
| | SLVVHEIAQMMIKYQAVV | AACACCACATACGGCACAGGTAAGTCTAAATATAAA |
| | VLENLNTGFKRVRGGISE | AAATTCCAGACCCAGTATTACCAGAAGACTCAGGAT |
| | KAVYQQFEKMLIEKLNEL | AAGTCAGGCTATCAGAAAGCACTTCGCAAATGGATT |
| | VFKDRAINQEGGVLKAYQ | GACTTTTCCAAAAAGTTTCTTCAAACATACGTCAGT |
| | LTDSFTSFAKLGNQSGEL | ACTTCCATTTTTGATTTCAAAGGTCTCCGTCCTTCG |
| | FYIPSAYTSKIDPGTGFV | AAGGATTATCAGGACTTAGGCGAGTTCTATAAAGAC |
| | DPFIWSHVTASEENRNEF | GTTAATTCGCGTTGTTACCGTGTGACGTTCGAGAAA |
| | LKGFDSLKYDAQSSAFVL | ATTCGCGTACAGGACATCCACGAAGCAGTCAAAAAT |
| | HFKMKSNKQFQKNNVEGF | GGGCAACTGTATCTCTTCCAATTATATAATAAGGAC |
| | MPEWDICFEKNEEKISLQ | TTCTCACCTAAAAGCCATGGGTTGCCTAATCTTCAC |
| | GSKYTAGKRIIFDSKKKQ | ACTCTCTATTGGAAAGCCGTGTTCGATCCTGAGAAC |
| | YMECFPQNELMKALQDVG | TTGAAGGACCCTATCGTAAAACTTAATGGCCAAGCT |
| | ITWNTGNDIWQDVLKQAS | GAGTTATTCTATCGGCCGAAATCCAACATGCAAATC |
| | TDTGERHRMINLIRSVLQ | ATCCAACATAAGACCGGGGAGGAGATTGTGAACAAA |
| | MRSSNGATGEDYINSPVM | AAGCTGAAGGACGGCACCCCGGTTCCTGATGATATC |
| | DLDGRFFDTRAGIRDLPL | TACCGCGAAATCAGTGCTTACGTCCAGGGGAAATGT |
| | DADANGAYHIALKGRMVL | CAAGGCAACTTATCCCCGGAGGCAGAGAAGTGGCTC |
| | ERIRSQKNTAIKNTDWLY | CCAAGTGTCACAATCAAGAAAGCCGCCCATGATATC |
| | AIQEERNGAPKRPAATKK | ACAAAGGATCGTCGCTTTACCGAAGATAAGTTTTTC |
| | AGQAKKKKASGSGAGSPK | TTTCATGTCCCTATTACACTGAACTATCAGAGTTCA |
| | KKRKVEDPKKKRKV | GGCAAGCCGACGGCATTCAACTCGCAAGTAAACGAT |
| | (SEQ ID NO: 789) | TTCTTGACCGAGCACCCTGAGACAAATATCATCGGC |
| | | ATTGATCGGGGTGAACGTAACTTGATTTATGCCGTT |
| | | GTAATCACTCCAGATGGCAAGATTCTCGAACAGAAA |
| | | TCTTTTAACGTGATCCACGACTTTGATTATCATGAA |
| | | TCCCTGTCCCAGCGGGAAAAACAGCGGGTAGCAGCG |
| | | CGTCAGGCTTGGACAGCGATTGGTCGCATCAAGGAT |
| | | CTCAAGGAAGGTTACCTGTCGCTTGTGGTGCACGAA |
| | | ATTGCTCAAATGATGATCAAATACCAAGCAGTCGTC |
| | | GTATTAGAAAACCTCAACACGGGCTTTAAGCGTGTG |
| | | CGCGGTGGTATCAGTGAGAAGGCCGTCTACCAACAG |
| | | TTCGAAAAAATGTTGATTGAAAAATTGAACTTCCTG |
| | | GTATTTAAAGATCGGGCAATCAATCAGGAAGGCGGG |
| | | GTTCTCAAAGCTTACCAGCTGACAGACTCGTTTACG |
| | | TCTTTTGCAAAGTTAGGTAACCAGTCCGGTTTCCTG |
| | | TTCTACATCCCGTCCGCCTACACCAGCAAAATCGAC |
| | | CCTGGTACGGGCTTCGTCGATCCTTTTATCTGGTCT |
| | | CACGTGACCGCTTCTGAGGAAAATCGGAATGAATTT |
| | | TTAAAGGGCTTTGATAGCTTGAAATATGACGCCCAA |
| | | TCATCCGCCTTTGTACTGCATTTCAAGATGAAATCC |
| | | AATAAGCAATTTCAGAAGAACAATGTTGAAGGTTTC |
| | | ATGCCGGAATGGGATATCTGCTTCGAGAAAAACGAG |
| | | GAAAAGATTTCCTTGCAGGGTAGTAAGTATACAGCC |
| | | GGTAAACGCATTATTTTCGACTCCAAAAAGAAGCAA |
| | | TACATGGAGTGCTTCCCGCAGAATGAGCTCATGAAA |
| | | GCACTGCAGGACGTAGGCATCACCTGGAACACGGGC |
| | | AACGATATCTGGCAGGATGTCCTTAAACAAGCGAGC |
| | | ACAGATACAGGGTTTCGTCACCGGATGATCAACCTG |
| | | ATCCGTTCAGTGCTCCAGATGCGGTCCAGTAATGGT |
| | | GCGACCGGGGAGGATTACATCAATTCACCTGTGATG |
| | | GATCTGGACGGCCGTTTTTTCGACACTCGGGCGGGG |
| | | ATTCGTGATCTGCCATTGGATGCCGACGCCAACGGC |
| | | GCATACCACATCGCTTTAAAAGGGCGTATGGTACTC |
| | | GAACGCATTCGCTCCCAAAAGAATACCGCGATTAAG |
| | | AACACTGACTGGTTATACGCAATCCAAGAGGAACGT |
| | | AACGGCGCGCCAAAAAGGCCGGCGGCCACGAAAAAG |
| | | GCCGGCCAGGCAAAAAAGAAAAAGGCTAGCGGCAGC |
| | | GGCGCCGGATCCCCAAAGAAGAAAAGGAAGGTTGAA |
| | | GACCCCAAGAAAAAGAGGAAGGTGTGATAA (SEQ |
| | | ID NO: 790) |
| ABW2 | MGHHHHHHSSGLVPRGSG | ATGGGCCACCATCATCATCATCATAGCAGCGGCCTG |
| | TMKEFTNQYSLTKTLRFE | GTGCCGCGCGGCAGCGGTACCATGAAGGAGTTTACC |
| | LRPVGETAEKIEDFKSGG | AACCAATATTCCTTAACCAAGACCCTGCGGTTCGAG |
| | LKQTVEKDRERTEAYKQL | TTGCGGCCAGTCGGCGAAACAGCAGAAAAGATCGAA |
| | KEVIDSYHRDFIEQAFAR | GATTTTAAATCGGGCGGGCTCAAGCAAACAGTGGAA |
| | QQTLSEEDFKQTYQLYKE | AAGGATCGTGAGCGTACAGAAGCGTATAAGCAGTTG |
| | AQKEKDGETLTKQYEHLR | AAAGAGGTTATTGACTCCTATCATCGTGACTTCATT |
| | KKIAAMESKATKEWAVMG | GAGCAAGCTTTTGCGCGCCAGCAGACGCTGTCCGAG |
| | ENNELIGKNKESKLYQWL | GAGGATTTTAAACAAACATATCAACTGTACAAAGAG |
| | EKNYRAGRIEKEEFDHNA | GCCCAGAAAGAGAAGGATGGGGAAACATTAACAAAG |
| | GLIEYFEKFSTYFVGEDK | CAGTACGAGCATTTACGGAAGAAAATCGCAGCTATG |
| | NRANMYSKEAKATAISER | TTCAGCAAGGCTACGAAGGAATGGGCCGTTATGGGG |
| | TINENMVKHEDNCQRLEK | GAGAATAACGAATTGATCGGGAAAAACAAAGAGTCA |
| | IKSKYPDLAEELKDFEEF | AAGTTGTATCAGTGGCTGGAGAAGAACTACCGCGCA |
| | FKPSYFINCMNQSGIDYY | GGTCGCATCGAAAAAGAGGAATTCGACCATAATGCG |
| | NISAIGGKDEKDQKANMK | GGCTTAATCGAATACTTCGAGAAATTTTCCACATAT |
| | INLFTQKNHLKGSDKPPF | TTCGTAGGTTTTGACAAAAATCGTGCGAATATGTAT |
| | FAKLYKQILSDREKSVVI | TCAAAGGAGGCAAAGGCGACCGCAATTTCCTTCCGG |
| | DEFEKDSELTEALKNVES | ACGATTAATGAGAACATGGTCAAGCATTTCGATAAT |
| | KDGLINEEFFTKLKSALE | TGCCAGCGGCTCGAGAAGATTAAATCTAAATATCCT |
| | NEMLPEYQGQLYIRNAFL | GATTTGGCCGAGGAGCTGAAGGATTTTGAGGAGTTT |
| | TKISANIWGSGSWGIIKD | TTTAAACCTAGCTATTTCATTAATTGTATGAATCAA |
| | AVTQAAENNFTRKSDKEK | TCGGGTATCGACTACTACAATATCAGCGCGATCGGC |
| | YAKKDFYSIAELQQAIDE | GGTAAGGATGAAAAGGATCAGAAAGCGAATATGAAG |
| | YIPTLENGVQNASLIEYE | ATCAACCTTTTCACGCAAAAAAATCATTTAAAGGGC |
| | RKMNYKPRGSEEDAGLIE | AGTGATAAACCACCATTTTTTGCTAAGCTCTACAAG |
| | EINNNLRQAGIVLNQAEL | CAAATTTTGAGTGACCGGGAGAAGTCCGTGGTAATC |
| | GSGKQREENIEKIKNLLD | GACGAGTTCGAAAAGGACAGCGAATTGACAGAGGCA |
| | SVLNLERELKPLYLEKEK | CTCAAAAACGTGTTTTCCAAGGACGGTTTGATCAAT |
| | MRPKAANLNKDFCESEDP | GAGGAGTTTTTTACAAAGTTAAAAAGTGCATTAGAA |
| | LYEKLKTFFKLYNKVRNY | AATTTTATGTTGCCTGAATATCAAGGTCAACTCTAC |
| | ATKKPYSKDKFKINEDTA | ATCCGTAACGCTTTCCTTACGAAGATCAGCGCAAAC |
| | TLLYGWSLDKETANLSVI | ATTTGGGGCTCTGGTTCTTGGGGCATCATCAAGGAC |
| | FRKREKFYLGIINRYNSQ | GCAGTTACCCAGGCTGCGGAAAACAATTTCACGCGT |
| | IFNYKIAGSESEKGLERK | AAGTCTGACAAGGAAAAGTATGCCAAGAAAGACTTC |
| | RSLQQKVLAEEGEDYFEK | TATTCCATTGCTGAACTCCAGCAGGCTATTGATGAA |
| | MVYHLLLGASKTIPKCST | TACATTCCTACTCTGGAGAACGGGGTTCAAAACGCA |
| | QLKEVKAHFQKSSEDYII | TCACTCATCGAGTACTTTCGCAAAATGAATTACAAA |
| | QSKSFAKSLTLTKEIFDL | CCACGCGGTTCTGAAGAAGACGCAGGCTTGATCGAA |
| | NNLRYNTETGEISSELSD | GAAATTAATAACAACCTGCGTCAGGCTGGGATCGTC |
| | TYPKKFQKGYLTQTGDVS | CTGAATCAAGCCGAGCTGGGGTCTGGTAAGCAGCGG |
| | GYKTALHKWIDECKEFLR | GAAGAGAATATTGAAAAAATTAAGAACTTATTAGAT |
| | CYRNTEIFTFHFKDTKEY | TCGGTTTTGAATCTCGAACGTTTCTTAAAGCCACTT |
| | ESLDEFLKEVDSSGYEIS | TACTTGGAGAAAGAGAAAATGCGTCCAAAAGCTGCT |
| | FDKIKASYINEKVNAGEL | AACCTGAATAAGGATTTTTGTGAGTCATTTGATCCA |
| | YLFEIYNKDFSEYSKGKP | CTTTACGAGAAACTGAAAACGTTTTTCAAGCTCTAC |
| | NLHTIYWKSLFETQNLLD | AATAAAGTACGTAACTACGCAACAAAGAAACCATAC |
| | KTAKLNGKAEIFFRPRSI | TCAAAGGACAAATTTAAGATCAATTTTGATACCGCT |
| | KHNDKIIHRAGETLKNKN | ACGTTATTATATGGGTGGAGTTTGGATAAGGAAACC |
| | PLNEKPSSREDYDITKDR | GCGAATCTCAGCGTCATTTTCCGTAAACGCGAAAAA |
| | RFTKDKFFLHCPITLNEK | TTCTATTTGGGTATCATCAACCGGTACAATAGCCAG |
| | QDKPVRFNEQVNLYLKDN | ATTTTCAATTATAAGATTGCGGGCAGTGAGAGCGAG |
| | PDVNIIGIDRGERHLLYY | AAAGGGTTAGAGCGTAAGCGGTCGCTGCAGCAAAAG |
| | TLINQNGEILQQGSLNRI | GTGCTTGCAGAGGAGGGTGAAGATTATTTTGAGAAA |
| | GEEESRPTDYHRLLDERE | ATGGTATACCACCTGCTGCTTGGCGCGTCGAAAACT |
| | KQRQQARETWKAVEGIKD | ATTCCGAAATGCTCGACACAGTTGAAAGAAGTAAAA |
| | LKAGYLSRVVHKLAGLMV | GCACACTTTCAAAAGTCATCAGAAGATTATATTATC |
| | QNNAIVVLEDLNKGEKRG | CAATCCAAATCATTTGCAAAGTCATTAACATTAACA |
| | RFAVEKQVYQNFEKALIQ | AAAGAGATCTTTGACTTAAATAATCTGCGGTATAAC |
| | KLNYLVFKEVNSKDAPGH | ACAGAAACGGGCGAAATTAGTTCCGAGCTTTCTGAT |
| | YLKAYQLTAPFISFEKLG | ACATATCCGAAGAAGTTCCAGAAGGGGTATCTCACA |
| | TQSGELFYVRAWNTSKID | CAAACAGGCGACGTTTCGGGTTACAAAACTGCTCTG |
| | PATGFTDQIKPKYKNQKQ | CATAAGTGGATTGATTTCTGCAAAGAGTTCTTGCGT |
| | AKDFMSSFDSVRYNRKEN | TGCTATCGTAATACGGAGATCTTCACGTTCCATTTC |
| | YFEFEADFEKLAQKPKGR | AAGGACACGAAGGAGTACGAGTCGTTAGATGAGTTC |
| | TRWTICSYGQERYSYSPK | TTGAAAGAAGTGGATAGTTCAGGTTATGAGATTTCA |
| | ERKFVKHNVTQNLAELEN | TTCGATAAGATCAAAGCCTCTTATATCAACGAGAAG |
| | SEGISEDSGQCFKDEILK | GTTAATGCAGGCGAGCTGTACTTGTTCGAGATCTAT |
| | VEDASFFKSIIFNLRLLL | AATAAAGATTTCTCCGAGTATTCCAAAGGTAAGCCA |
| | KLRHTCKNAEIERDFIIS | AATCTGCATACCATTTATTGGAAAAGTCTCTTCGAG |
| | PVKGNNSSFFDSRIAEQE | ACTCAAAACTTGCTGGATAAAACAGCGAAACTCAAC |
| | NITSIPQNADANGAYNIA | GGCAAGGCAGAGATCTTCTTCCGGCCACGTTCGATC |
| | LKGLMNLHNISKDGKAKL | AAACACAACGACAAAATCATCCACCGTGCGGGCGAA |
| | IKDEDWIEFVQKRKFAAA | ACACTTAAGAATAAAAACCCGCTCAATGAAAAGCCT |
| | KRPAATKKAGQAKKKKAS | AGTTCGCGTTTCGATTACGATATTACGAAAGATCGT |
| | GSGAGSPKKKRKVEDPKK | CGTTTTACGAAAGACAAATTTTTTTTACACTGCCCT |
| | KRKV (SEQ ID NO: | ATTACGTTAAACTTTAAGCAGGACAAGCCTGTTCGC |
| | 16) | TTTAATGAACAAGTCAACTTATACTTAAAAGACAAT |
| | | CCAGACGTGAATATTATCGGTATCGATCGTGGTGAG |
| | | CGTCACTTGCTTTATTACACTTTGATCAATCAGAAT |
| | | GGTGAGATCTTACAGCAGGGTTCACTTAATCGCATT |
| | | GGTGAGGAAGAATCTCGGCCTACGGACTACCATCGG |
| | | TTACTCGATGAGCGTGAAAAGCAGCGTCAACAAGCA |
| | | CGGGAGACGTGGAAAGCAGTAGAAGGGATTAAGGAC |
| | | TTAAAAGCTGGGTATCTTTCACGGGTTGTACATAAA |
| | | CTTGCAGGTTTAATGGTACAAAACAACGCAATTGTC |
| | | GTTCTGGAAGATCTTAACAAGGGTTTTAAGCGCGGT |
| | | CGTTTCGCTGTTGAGAAACAGGTGTACCAGAACTTC |
| | | GAAAAAGCACTTATTCAAAAGCTTAACTATTTAGTG |
| | | TTCAAGGAGGTCAACTCTAAAGACGCCCCTGGCCAC |
| | | TATTTGAAGGCATATCAGCTTACGGCCCCTTTCATC |
| | | TCGTTCGAAAAATTGGGTACTCAGAGCGGTTTCCTT |
| | | TTTTATGTGCGCGCATGGAATACCTCGAAGATCGAC |
| | | CCGGCGACGGGTTTTACCGACCAAATCAAACCAAAG |
| | | TATAAAAACCAAAAACAAGCTAAAGACTTCATGTCA |
| | | AGCTTCGACTCTGTCCGGTACAACCGCAAGGAAAAT |
| | | TATTTTGAATTCGAGGCGGACTTTGAAAAACTGGCA |
| | | CAGAAACCTAAGGGGCGCACCCGCTGGACGATTTGT |
| | | TCCTATGGCCAGGAACGGTACTCTTACTCCCCAAAA |
| | | GAACGGAAGTTTGTAAAGCACAACGTTACACAAAAT |
| | | CTTGCTGAGCTTTTTAATTCAGAGGGTATCTCGTTC |
| | | GACTCCGGGCAGTGTTTCAAGGATGAGATCCTGAAG |
| | | GTCGAGGATGCCAGTTTCTTTAAGTCTATTATTTTC |
| | | AATCTTCGCCTCCTTCTCAAGCTTCGTCACACTTGC |
| | | AAGAACGCCGAGATCGAACGTGATTTCATCATTTCT |
| | | CCTGTCAAGGGGAACAATTCGTCCTTTTTTGACTCC |
| | | CGTATTGCCGAACAAGAAAATATCACCAGCATTCCA |
| | | CAGAATGCTGATGCAAACGGTGCATACAACATCGCG |
| | | CTGAAGGGCCTGATGAACCTCCATAATATCTCTAAG |
| | | GACGGCAAGGCAAAATTAATTAAGGATGAAGATTGG |
| | | ATCGAATTTGTCCAAAAACGCAAGTTCGCGGCCGCA |
| | | AAAAGGCCGGCGGCCACGAAAAAGGCCGGCCAGGCA |
| | | AAAAAGAAAAAGGCTAGCGGCAGCGGCGCCGGATCC |
| | | CCAAAGAAGAAAAGGAAGGTTGAAGACCCCAAGAAA |
| | | AAGAGGAAGGTGTGATAA (SEQ ID NO: 17) |
| ABW3 | MGHHHHHHSSGLVPRGSL | ATGGGCCACCATCATCATCATCATAGCAGCGGCCTG |
| | QMKTLSDFTNLFPLSKTL | GTGCCGCGCGGCAGCCTGCAGATGAAGACCTTGTCT |
| | RFKLIPIGNTLKNIEASG | GATTTTACCAATCTGTTCCCTTTATCTAAGACTCTC |
| | ILDEDRHRAESYVKVKAI | CGTTTCAAGCTGATTCCAATCGGCAACACGCTCAAG |
| | IDEYHKAFIDRVLSDTCL | AACATTGAAGCTAGTGGCATCCTTGACGAGGATCGC |
| | QTESIGKHNSLEEFFFYY | CACCGCGCGGAGTCCTATGTCAAGGTCAAGGCCATC |
| | QIGAKSEQQKKTEKKIQD | ATCGACGAATATCATAAAGCTTTCATCGATCGGGTC |
| | ALRKQIADSLTKDKHESR | CTGTCGGATACTTGCCTCCAGACGGAATCTATCGGC |
| | IDKKELIQEDLIQFVRDG | AAACACAACAGTCTCGAGGAATTCTTTTTCTACTAC |
| | EDAAEKTSLISEFQNFTV | CAAATTGGTGCAAAAAGTGAACAGCAGAAAAAGACG |
| | YFTGFHENRQNMYSPDEK | TTTAAAAAGATTCAAGACGCCTTGCGCAAACAAATC |
| | STAIAYRLINENLPKFVD | GCAGATAGCCTCACCAAGGACAAACATTTTTCACGG |
| | NMKVEDRIAASELASCED | ATTGATAAAAAAGAATTGATCCAAGAGGATTTGATC |
| | ELYHNFEEYLQVERLHDI | CAGTTTGTGCGCGATGGGGAGGATGCCGCTGAAAAG |
| | FSLDYFNLLLTQKHIDVY | ACGTCTCTGATTTCCGAATTTCAAAATTTCACAGTT |
| | NALIGGKATETGEKIKGL | TATTTTACCGGGTTTCATGAGAATCGCCAGAACATG |
| | NEYINLYNQRHKQEKLPK | TACAGTCCGGACGAGAAGTCCACGGCCATCGCATAT |
| | FKMLFKQILTDREAISWL | CGCTTAATTAACGAGAATCTCCCAAAATTCGTAGAC |
| | PRQFDDNSQLLSAIEQCY | AACATGAAAGTTTTTGACCGTATCGCGGCGTCCGAA |
| | NHLSTYTLKDGSLKYLLE | TTGGCATCGTGTTTCGACGAATTATACCACAACTTC |
| | NLHTYDTEKIFIRNDSLL | GAGGAATACCTCCAAGTGGAGCGGTTACATGATATC |
| | TEISQRHYGSWSILPEAI | TTTAGTTTGGACTATTTCAATCTGCTTCTCACGCAG |
| | KRHLERANPQKRRETYEA | AAACATATCGACGTCTATAATGCTCTGATCGGTGGG |
| | YQSRIEKAFKAYPGESIA | AAGGCAACCGAAACCGGGGAAAAGATCAAGGGCTTA |
| | FLNGCLTETGKESPSIES | AATGAATACATCAATCTCTACAATCAACGTCACAAG |
| | YFESLGAVETETSQQENW | CAGGAAAAACTGCCAAAATTCAAGATGTTATTCAAG |
| | FARIANAYTDFREMQNRL | CAAATTCTTACCGACCGTGAGGCAATCAGCIGGTTG |
| | HATDVPLAQDAEAVARIK | CCACGCCAATTTGACGATAATAGTCAGTTACTCTCA |
| | KLLDALKGLQLFIKPLLD | GCCATTGAACAGTGTTATAACCACCTTTCGACCTAC |
| | TGEEAEKDERFYGDFTEF | ACACTCAAGGATGGGTCACTCAAATACCTGTTAGAA |
| | WNELDTITPLYNMVRNYL | AACCTGCATACATACGATACTGAAAAGATCTTCATC |
| | TRKPYSEEKIKLNFQNPT | CGCAATGACAGTTTACTTACGGAAATCTCCCAACGG |
| | LLNGWDLNKEVDNTSVIL | CATTACGGTTCGTGGTCGATTTTACCAGAAGCTATC |
| | RRNGRYYLAIMHRNHRRV | AAACGTCATCTCGAGCGCGCGAACCCGCAAAAACGG |
| | FSQYPGTERGDCYEKMEY | CGCGAAACATACGAGGCCTATCAATCTCGCATTGAG |
| | KLLPGANKMLPKVFFSKS | AAGGCCTTTAAGGCATATCCGGGGTTTTCAATTGCT |
| | RIDEFNPSEELLARYQQG | TTCCTCAATGGGTGTTTAACAGAGACAGGTAAGGAG |
| | THKKGENENLHDCHALID | TCGCCATCCATCGAAAGCTATTTTGAAAGTCTGGGT |
| | FFKDSIEKHEEWRNFHFK | GCTGTCGAAACAGAGACCTCTCAGCAGGAAAACTGG |
| | FSDTSSYTDMSGFYREIE | TTTGCCCGCATCGCAAACGCTTATACGGACTTTCGT |
| | TQGYKLSFVPVACEYIDE | GAAATGCAAAATCGGCTGCACGCCACTGACGTGCCG |
| | LVRDGKIFLFQIYNKDES | TTGGCTCAAGACGCTGAGGCAGTGGCCCGGATCAAG |
| | TYSKGKPNMHTLYWEMLF | AAGCTGTTAGATGCACTGAAAGGCCTGCAATTATTC |
| | DERNLMNVVYKLNGQAEI | ATTAAGCCTCTTTTGGATACTGGCGAAGAAGCAGAG |
| | FFRKASLSARHPEHPAGL | AAAGATGAACGGTTCTATGGGGACTTTACCGAATTC |
| | PIKKKQAPTEESCFPYDL | TGGAACGAGTTAGACACTATCACGCCATTGTACAAT |
| | IKNKRYTVDQFQFHVPIT | ATGGTACGGAACTATCTCACGCGTAAGCCTTATAGT |
| | INFKATGTSNINPSVTDY | GAAGAAAAAATCAAGCTCAATTTCCAGAATCCGACA |
| | IRTADDLHIIGIDRGERH | TTACTGAACGGTTGGGATTTGAACAAAGAGGTAGAT |
| | LLYLVVIDSQGRICEQFS | AATACATCTGTCATCCTCCGCCGGAATGGTCGTTAT |
| | LNEIVTQYQGHQYRTDYH | TATCTTGCCATCATGCACCGCAACCACCGGCGTGTA |
| | ALLQKKEDERQKARQSWQ | TTTTCACAGTATCCAGGCACAGAACGTGGCGATTGT |
| | SIENIKELKEGYLSQVVH | TATGAGAAAATGGAATATAAACTGCTTCCGGGCGCC |
| | KVSELMIKYKAIVVLEDL | AACAAGATGCTCCCAAAAGTCTTCTTCTCTAAATCA |
| | NAGFKRSRQKVEKQVYQK | CGCATCGATGAATTCAACCCTAGCGAAGAATTATTA |
| | FEKMLIDKLNYLVEKTAE | GCACGTTACCAGCAAGGTACCCACAAGAAGGGTGAG |
| | ADQPGGLLHAYQLTNKFE | AATTTTAATTTACACGACTGCCATGCCTTGATTGAT |
| | SFKKMGKQSGELFYIPAW | TTTTTTAAAGACTCTATTGAGAAACATGAAGAATGG |
| | NTSKIDPTTGFVNLEDTR | CGTAACTTTCATTTTAAATTTAGTGATACGTCCAGT |
| | YENVDKSRAFFGKEDSIR | TACACCGACATGAGCGGCTTTTATCGTGAAATCGAA |
| | YRADKGTFEWTEDYNNFH | ACACAGGGTTACAAGTIGTCATTTGTGCCAGTGGCG |
| | KKAEGTRSSWCLSSHGNR | TGTGAATACATCGATGAGTTGGTACGTGATGGCAAA |
| | VRTERNPAKNNQWDNEEI | ATCTTTTTGTTCCAGATCTATAATAAGGACTTTTCG |
| | DLTQAFRDLFEAWGIEIT | ACCTACTCTAAGGGCAAGCCAAATATGCACACTCTT |
| | SNLKEAICNQSEKKFFSE | TATTGGGAAATGCTTTTCGACGAGCGGAACCTGATG |
| | LFELFKLMIQLRNSVTGT | AACGTGGTGTATAAACTCAATGGCCAAGCAGAGATC |
| | NIDYMVSPVENHYGTFED | TTTTTTCGTAAAGCATCACTGAGCGCACGTCACCCT |
| | SRTCDSSLPANADANGAY | GAGCACCCGGCAGGGTTGCCAATTAAAAAAAAACAG |
| | NIARKGLMLARRIQATPE | GCCCCGACGGAAGAATCTTGTTTCCCATATGATCTC |
| | NDPISLTLSNKEWLRFAQ | ATTAAGAATAAGCGGTATACAGTTGACCAGTTTCAG |
| | GLDETTTYEAAAKRPAAT | TTTCACGTGCCAATTACTATTAATTTTAAAGCAACT |
| | KKAGQAKKKKASGSGAGS | GGGACTTCAAATATCAACCCGTCGGTCACTGATTAT |
| | PKKKRKVEDPKKKRKV | ATTCGTACGGCCGATGACCTCCATATCATTGGCATT |
| | (SEQ ID NO: 29) | GATCGCGGTGAGCGCCATTTACTTTATTTAGTGGTG |
| | | ATTGACTCACAAGGGCGCATCTGTGAACAGTTTTCC |
| | | TTAAACGAGATCGTAACGCAATACCAAGGTCACCAG |
| | | TACCGTACAGATTATCATGCTCTCTTGCAGAAAAAA |
| | | GAGGATGAACGGCAAAAAGCTCGCCAGTCTTGGCAA |
| | | TCGATCGAAAACATCAAGGAATTAAAAGAGGGGTAT |
| | | CTGAGCCAAGTAGTGCACAAGGTTTCTGAACTGATG |
| | | ATCAAATATAAAGCAATTGTGGTGTTGGAAGATTTA |
| | | AATGCTGGGTTCAAGCGGAGTCGGCAGAAGGTTGAA |
| | | AAGCAAGTGTATCAAAAATTTGAGAAGATGCTGATC |
| | | GACAAACTTAACTATCTTGTGTTCAAGACCGCAGAA |
| | | GCTGACCAACCTGGCGGCCTCCTGCACGCATACCAA |
| | | TTAACAAATAAATTTGAGTCATTCAAGAAAATGGGG |
| | | AAGCAAAGTGGCTTCCTCTTCTACATTCCTGCATGG |
| | | AACACGTCTAAAATCGACCCGACCACGGGCITTGTC |
| | | AACCTTTTTGATACCCGGTATGAGAACGTAGACAAA |
| | | TCCCGTGCCTTCTTCGGCAAATTCGATAGCATCCGC |
| | | TACCGTGCGGACAAGGGCACGTTCGAGTGGACGTTC |
| | | GATTATAATAACTTTCACAAAAAGGCCGAAGGTACG |
| | | CGGTCGAGCTGGTGTTTGTCTTCTCATGGTAACCGG |
| | | GTCCGTACTTTCCGCAATCCTGCGAAAAACAACCAA |
| | | TGGGACAACGAAGAGATCGACTTAACACAAGCGTTC |
| | | CGCGATCTGTTTGAAGCTTGGGGGATCGAGATCACT |
| | | TCGAACTTAAAAGAGGCCATTTGCAACCAGTCTGAG |
| | | AAGAAATTCTTTTCTGAGCTTTTCGAACTGTTCAAA |
| | | CTTATGATCCAGCTGCGGAACTCAGTGACAGGCACG |
| | | AATATCGACTATATGGTGAGCCCAGTCGAGAATCAC |
| | | TACGGCACGTTCTTCGATTCGCGCACATGCGATTCG |
| | | TCTCTGCCGGCTAACGCTGACGCTAATGGTGCTTAT |
| | | AATATTGCCCGTAAGGGGTTAATGCTGGCTCGCCGC |
| | | ATTCAGGCTACCCCTGAGAATGATCCGATCTCCTTA |
| | | ACATTGAGCAACAAAGAGTGGTTACGCTTTGCACAG |
| | | GGGCTCGATGAGACAACAACCTACGAGGCGGCCGCA |
| | | AAAAGGCCGGCGGCCACGAAAAAGGCCGGCCAGGCA |
| | | AAAAAGAAAAAGGCTAGCGGCAGCGGCGCCGGATCC |
| | | CCAAAGAAGAAAAGGAAGGTTGAAGACCCCAAGAAA |
| | | AAGAGGAAGGTGTGATAA (SEQ ID NO: 30) |
| ABW4 | MGHHHHHHSSGLVPRGSG | ATGGGCCACCATCATCATCATCATAGCAGCGGCCTG |
| | TMKNMESFINLYPVSKTL | GTGCCGCGCGGCAGCGGTACCATGAAGAACATGGAG |
| | RFELKPIGKTLETFSRWI | TCTTTTATTAATTTATATCCGGTTTCGAAAACTTTA |
| | EELKEKEAIELKETGNLL | CGTTTTGAGTTAAAGCCTATTGGCAAAACACTCGAA |
| | AQDEHRAESYKKVKKILD | ACTTTCTCCCGCTGGATCGAAGAGTTGAAAGAGAAA |
| | EYHKWFITESLQNTKLNG | GAGGCTATTGAGCTGAAAGAAACTGGCAACCTGTTG |
| | LDVFYHNYMLPKKEDHEK | GCGCAGGATGAGCATCGGGCCGAGTCTTATAAGAAG |
| | KAFASCQDNLRKQIVNAF | GTCAAAAAAATTCTTGACGAATATCATAAATGGTTC |
| | RQETGLENKLSGKELFKD | ATCACTGAAAGCCTCCAGAACACAAAGTTAAATGGG |
| | SKEEVALLKAIVPYEDNK | TTGGACGTTTTTTATCATAACTATATGCTCCCGAAG |
| | TLENIGVKSNEGALLLIE | AAAGAGGACCATGAGAAGAAAGCTTTTGCTTCGTGT |
| | EFKDETTYFGGFHENRKN | CAAGATAATCTCCGTAAGCAAATTGTAAACGCGTTT |
| | MYSDEAKSTAVAFRLIHE | CGTCAAGAAACCGGTTTATTTAACAAACTGTCAGGC |
| | NLPRFIDNKKVFEEKIMN | AAAGAACTGTTTAAAGATTCGAAGGAAGAGGTTGCA |
| | SELKDKFPEILKELEQIL | CTGTTGAAAGCCATTGTACCGTATTTCGATAACAAG |
| | QVNEIEEMFQLDYENDTL | ACTCTGGAAAACATTGGTGTTAAGAGTAATGAAGGG |
| | IQNGIDVYNHLIGGYAEE | GCTCTCCTTTTAATTGAAGAGTTCAAGGATTTTACC |
| | GKKKIQGLNEHINLYNQI | ACGTATTTCGGTGGCTTCCATGAGAATCGCAAAAAT |
| | QKEKNKRIPRLKPLYKQI | ATGTATAGCGACGAAGCAAAATCAACAGCGGTTGCC |
| | LSDRETASFVIEAFENDG | TTTCGTCTTATTCACGAAAATTTGCCGCGCTTCATT |
| | ELLESLEKSYRLLQQEVF | GACAATAAGAAGGTCTTCGAAGAGAAAATCATGAAT |
| | TPEGKEGLANLLAAIAES | AGTGAATTAAAGGATAAATTTCCAGAGATTTTGAAG |
| | ETHKIFLKNDLGLTEISQ | GAGCTGGAACAGATTCTGCAAGTCAACGAGATTGAA |
| | QIYESWSLIEEAWNKQYD | GAGATGTTTCAGCTCGACTATTTTAACGACACATTG |
| | NKQKKVTETETYVDNRKK | ATCCAGAATGGCATCGATGTCTATAACCATTIGATC |
| | AFKSIKSFSIAEVEEWVK | GGCGGCTACGCCGAGGAAGGCAAGAAAAAAATTCAA |
| | ALGNEKHKGKSVATYFKS | GGGCTTAACGAGCATATTAACCTCTATAACCAGATC |
| | LGKTDEKVSLIEQVENNY | CAGAAGGAGAAGAATAAGCGTATCCCGCGGCTGAAA |
| | NIIKDLLNTPYPPSKDLA | CCACTCTATAAGCAAATTTTGAGTGATCGCGAAACC |
| | QQKDDVEKIKNYLDSLKA | GCCTCATTTGTTATCGAGGCGTTTGAGAACGATGGC |
| | LQRFIKPLLGSGEESDKD | GAGTTATTAGAATCATTGGAGAAGTCATATCGCTTA |
| | AHFYGEFTAFWDVLDKVT | CTGCAGCAGGAGGTCTTTACGCCTGAAGGTAAAGAA |
| | PLYNKVRNYMTKKPYSTE | GGTCTGGCGAATTTACTCGCAGCAATCGCTGAAAGC |
| | KFKLNFENSYFLNGWAQD | GAGACACACAAGATCTTTCTGAAGAACGACTTGGGT |
| | YETKAGLIFLKDGNYFLA | CTCACCGAGATCTCTCAACAAATTTATGAATCATGG |
| | INNKKLDEKEKKQLKTNY | TCGCTGATTGAAGAGGCATGGAATAAACAATATGAC |
| | EKNPAKRIILDFQKPDNK | AACAAACAGAAGAAAGTTACGGAGACAGAGACATAT |
| | NIPRLFIRSKGDNFAPAV | GTGGACAATCGGAAAAAGGCTTTCAAGTCCATCAAG |
| | EKYNLPISDVIDIYDEGK | AGCTTTAGCATCGCAGAGGTTGAGGAATGGGTGAAA |
| | FKTEYRKINEPEYLKSLH | GCACTTGGGAATGAGAAACACAAGGGCAAAAGCGTG |
| | KLIDYFKLGESKHESYKH | GCAACCTATTTTAAAAGTCTCGGGAAGACTGACGAA |
| | YSFSWKKTHEYENIAQFY | AAAGTTAGCCTTATTGAACAGGTAGAGAACAATTAT |
| | HDVEVSCYQVLDENINWD | AATATCATCAAGGACCTTTTGAACACACCGTATCCT |
| | SLMEYVEQNKLYLFQIYN | CCTTCGAAGGACTTGGCCCAGCAAAAAGATGACGTT |
| | KDFSPNSKGTPNMHTLYW | GAAAAAATCAAAAATTATTTGGACTCTCTGAAGGCC |
| | KMLFNPDNLKDVVYKLNG | CTCCAGCGGTTCATTAAGCCATTGTTGGGTAGCGGG |
| | QAEVFYRKASIKKENKIV | GAGGAATCCGATAAAGATGCGCACTTTTATGGTGAG |
| | HKANDPIDNKNELNKKKQ | TTTACCGCTTTCTGGGATGTGCTCGACAAAGTAACC |
| | NTFEYDIVKDKRYTVDKF | CCACTCTACAATAAAGTCCGCAACTATATGACTAAG |
| | QFHVPITLNFKAEGLNNL | AAACCTTATAGCACAGAGAAATTTAAGCTGAATTTT |
| | NSKVNEYIKECDDLHIIG | GAAAATAGTTACTTTTTGAATGGTTGGGCACAGGAC |
| | IDRGERHLLYLSLIDMKG | TACGAGACAAAAGCGGGGCTTATCTTCTTGAAGGAC |
| | NIVKQFSLNEIVNEHKGN | GGCAATTACTTCCTTGCCATCAATAATAAGAAATTA |
| | TYRTNYHNLLDKREKERE | GATGAAAAGGAGAAAAAACAGCTCAAGACTAATTAT |
| | KERESWKTIETIKELKEG | GAGAAGAATCCTGCGAAGCGTATCATCTTAGACTTT |
| | YISQVVHKITQLMIEYNA | CAGAAGCCAGACAATAAGAACATTCCTCGCTTGTTC |
| | IVVLEDLNFGFKRGRFKV | ATTCGCAGTAAAGGCGACAATTTCGCTCCTGCAGTA |
| | EKQVYQKFEKMLIDKLNY | GAAAAGTATAATCTTCCGATCTCTGACGTTATTGAC |
| | LVDKKKEANESGGTLKAY | ATCTATGACGAGGGGAAGTTTAAGACTGAGTATCGC |
| | QLTDSYADFMKYKKKQCG | AAAATTAACGAGCCGGAATATCTCAAATCTCTCCAT |
| | FLFYVPAWNTSKIDPTTG | AAGCTGATTGACTACTTCAAACTTGGGTTCTCCAAG |
| | FVNLFDTHYVNVSKAQEF | CATGAATCCTACAAGCATTATTCTTTTTCATGGAAG |
| | FSKEKSIRYNAANNYFEF | AAAACACATGAGTATGAGAACATCGCCCAGTTTTAC |
| | EVTDYFSFSGKAEGTKQN | CACGACGTGGAGGTCTCTTGCTATCAGGTGCTCGAC |
| | WIICTHGTRIINFRNPEK | GAAAATATTAACTGGGATTCCCTCATGGAGTATGTA |
| | NSQWDNKEVVITDEFKKL | GAACAGAACAAATTGTACTTGTTCCAGATTTATAAC |
| | FEKHGIDYKNSSDLKGQI | AAAGACTTCTCCCCAAACTCGAAAGGCACTCCGAAT |
| | ASQSEKAFFHNEKKDTKD | ATGCACACTTTGTACTGGAAGATGTTGTTTAATCCG |
| | PDGLLQLFKLALQMRNSF | GATAATCTTAAGGACGTGGTCTATAAGCTGAACGGT |
| | IKSEEDYLVSPVMNDEGE | CAGGCTGAAGTATTCTACCGGAAGGCGAGTATTAAG |
| | FFDSRKAQPNQPENADAN | AAAGAAAACAAGATTGTCCACAAGGCGAACGACCCT |
| | GAYNIAMKGKWVVKQIRE | ATTGACAATAAAAACGAGTTGAATAAGAAAAAGCAA |
| | SEDLDKLKLAISNKEWLN | AATACATTTGAATACGACATCGTCAAAGATAAACGG |
| | FAQRSAAAKRPAATKKAG | TATACAGTGGATAAGTTTCAATTCCATGTTCCTATC |
| | QAKKKKASGSGAGSPKKK | ACGCTCAACTTTAAAGCTGAAGGCCTGAATAACTTG |
| | RKVEDPKKKRKV | AATAGCAAAGTTAACGAATACATCAAAGAGTGTGAC |
| | (SEQ ID NO: 42) | GACCTTCACATTATTGGCATCGACCGGGGTGAACGG |
| | | CACCTCTTGTATCTGAGCCTCATCGATATGAAAGGT |
| | | AACATTGTAAAGCAATTTAGTCTTAACGAGATCGTT |
| | | AATGAGCACAAGGGGAACACGTACCGCACGAACTAT |
| | | CATAACCTCTTGGACAAACGTGAAAAGGAACGTGAA |
| | | AAAGAGCGCGAGTCATGGAAAACCATTGAGACCATC |
| | | AAAGAGCTGAAAGAAGGCTATATTAGTCAAGTAGTA |
| | | CATAAAATCACTCAGTTAATGATCGAATATAATGCG |
| | | ATCGTTGTACTCGAAGACCTGAATTTCGGCTTCAAA |
| | | CGCGGCCGGTTCAAGGTGGAGAAGCAAGTGTATCAA |
| | | AAATTTGAGAAGATGTTAATTGATAAACTGAACTAC |
| | | TTGGTCGATAAGAAGAAGGAAGCCAATGAGAGTGGC |
| | | GGGACACTCAAAGCCTACCAGCTTACCGATAGTTAC |
| | | GCTGACTTCATGAAGTACAAGAAAAAGCAATGCGGC |
| | | TTCCTGTTTTATGTCCCGGCCTGGAACACTTCCAAA |
| | | ATCGATCCTACTACTGGGTTCGTGAATCTGTTTGAC |
| | | ACACATTATGTCAATGTTAGTAAGGCCCAGGAATTT |
| | | TTCTCGAAATTCAAGTCAATTCGCTACAACGCGGCC |
| | | AACAACTATTTCGAGTTTGAAGTAACAGATTATTTT |
| | | TCCTTCAGTGGTAAAGCTGAGGGCACCAAGCAGAAT |
| | | TGGATCATTTGCACCCATGGCACCCGCATTATCAAT |
| | | TTTCGTAACCCGGAAAAAAATTCGCAGTGGGATAAT |
| | | AAGGAAGTAGTGATCACAGATGAATTCAAGAAACTG |
| | | TTTGAGAAGCACGGCATTGACTACAAAAATAGTTCC |
| | | GACCTCAAGGGGCAGATCGCCTCTCAATCGGAGAAG |
| | | GCGTTTTTTCATAACGAAAAAAAAGATACAAAGGAC |
| | | CCAGATGGCCTTCTGCAGCTTTTTAAACTGGCGCTG |
| | | CAGATGCGGAACTCTTTCATTAAGAGCGAAGAGGAC |
| | | TACTTAGTATCTCCTGTGATGAACGACGAAGGTGAA |
| | | TTCTTTGACTCGCGCAAAGCCCAGCCTAATCAGCCA |
| | | GAGAACGCTGATGCTAATGGGGCGTACAATATTGCA |
| | | ATGAAAGGGAAATGGGTTGTTAAGCAAATCCGCGAA |
| | | TCGGAGGACCTCGACAAGCTGAAACTGGCAATCTCA |
| | | AATAAAGAATGGTTGAACTTCGCCCAGCGCTCCGCG |
| | | GCCGCAAAAAGGCCGGCGGCCACGAAAAAGGCCGGC |
| | | CAGGCAAAAAAGAAAAAGGCTAGCGGCAGCGGCGCC |
| | | GGATCCCCAAAGAAGAAAAGGAAGGTTGAAGACCCC |
| | | AAGAAAAAGAGGAAGGTGTGATAA(SEQ ID NO: |
| | | 43) |
| ABW5 | MGHHHHHHSSGLVPRGSG | ATGGGCCACCATCATCATCATCATAGCAGCGGCCTG |
| | TMKNILEQFVGLYPLSKT | GTGCCGCGCGGCAGCGGTACCATGAAGAACATCTTA |
| | LRFELKPLGKTLEHIEKK | GAGCAGTTTGTCGGCTTATATCCGTTGTCTAAAACA |
| | GLIAQDEQRAEEYKLVKD | CTTCGGTTTGAGCTTAAACCTTTGGGTAAGACGTTG |
| | IIDRYHKAFIHMCLKHFK | GAACATATTGAGAAAAAAGGCTTGATTGCCCAAGAC |
| | LKMYSEQGYDSLEEYRKL | GAACAGCGGGCGGAGGAGTACAAATTGGTTAAAGAT |
| | ASISKRNEKEEQQFDKVK | ATTATTGATCGCTACCACAAGGCTTTTATTCATATG |
| | ENLRKQIVDAFKNGGSYD | TGCTTAAAACATTTTAAGCTCAAGATGTACAGTGAA |
| | DLFKKELIQKHLPRFIEG | CAAGGGTATGATAGCTTGGAGGAGTACCGCAAGCTT |
| | EEEKRIVDNENKFTTYFT | GCGTCAATTTCCAAACGCAACGAGAAAGAGGAGCAG |
| | GEHENRKNMYSDEKESTA | CAATTTGACAAAGTCAAGGAAAATCTTCGTAAGCAA |
| | IAYRLIHENLPLELDNMK | ATTGTCGACGCGTTTAAAAATGGCGGGAGTTATGAT |
| | SFAKIAESEVAARFTEIE | GATCTGTTTAAGAAAGAATTGATCCAGAAACACCTC |
| | TAYRTYLNVEHISELFTL | CCACGTTTTATTGAGGGTGAAGAAGAAAAACGTATC |
| | DYFSTVLTQEQIEVYNNI | GTTGACAACTTCAACAAGTTCACGACCTATTTTACT |
| | IGGRVDDDNVKIQGLNEY | GGTTTTCATGAAAATCGCAAGAATATGTATAGTGAC |
| | VNLYNQQQKDRSKRLPLL | GAAAAGGAATCGACGGCTATTGCTTATCGTCTCATT |
| | KSLYKMILSDRIAISWLP | CACGAAAACTTGCCATTGTTTTTGGATAACATGAAG |
| | EEFKSDKEMIEAINNMHD | AGCTTCGCTAAGATCGCCGAATCGGAAGTGGCTGCT |
| | DLKDILAGDNEDSLKSLL | CGTTTTACCGAAATCGAAACCGCTTACCGGACATAC |
| | QHIGQYDLSKIYIANNPG | TTGAACGTAGAACACATTAGTGAACTGTTCACCCTC |
| | LTDISQQMFGCYDVFTNG | GACTATTTTAGCACGGTTTTGACGCAAGAACAAATC |
| | IKQELRNSITPSKKEKAD | GAAGTATATAATAACATTATCGGCGGGCGCGTCGAC |
| | NEIYEERINKMFKSEKSF | GACGACAACGTAAAGATCCAAGGGTTGAATGAGTAC |
| | SIAYLNSLPHPKTDAPQK | GTAAATTTATATAATCAGCAGCAGAAGGACCGGTCT |
| | NVEDYFALLGTCNQNDEQ | AAGCGCTTACCGCTTCTTAAGTCCCTCTACAAAATG |
| | PINLFAQIEMARLVASDI | ATCTTATCCGATCGTATTGCAATTTCGTGGTTACCT |
| | LAGRHVNLNQSENDIKLI | GAGGAGTTCAAATCCGATAAGGAGATGATTGAAGCA |
| | KDLLDAYKALQHFVKPLL | ATTAACAACATGCATGACGACCTGAAGGACATTCTG |
| | GSGDEAEKDNEFDARLRA | GCAGGCGACAACGAAGACTCGCTTAAGTCCTTACTG |
| | AWNALDIVTPLYNKVRNW | CAGCATATTGGCCAATACGATCTCTCGAAAATCTAC |
| | LTRKPYSTEKIKLNFENA | ATTGCGAACAATCCGGGCCTGACAGATATCTCACAA |
| | QLLGGWDQNKEPDCTSVL | CAAATGTTCGGGTGTTATGACGTCTTTACTAATGGG |
| | LRKDGMYYLAIMDKKANH | ATCAAGCAGGAGCTCCGGAACAGTATTACCCCTTCA |
| | AFDCDCLPSDGACFEKID | AAAAAGGAGAAAGCCGATAACGAAATCTACGAGGAG |
| | YKLLPGANKMLPKVFFSK | CGGATTAACAAAATGTTTAAAAGTGAGAAGAGTTTC |
| | SRIKEFSPSESIIAAYKK | TCAATTGCCTACCTGAATTCGTTGCCGCACCCAAAG |
| | GTHKKGPNFSLSDCHRLI | ACGGATGCGCCTCAAAAAAATGTTGAGGATTATTTT |
| | DFFKASIDKHEDWSKERF | GCTCTCCTGGGGACTTGCAATCAAAACGATGAACAG |
| | RESDTKTYEDISGFYREV | CCGATTAATTTGTTTGCCCAAATTGAGATGGCACGC |
| | EQQGYMLGFRKVSEAFVN | TTAGTCGCCTCTGATATTCTCGCAGGCCGGCACGTT |
| | KLVDEGKLYLFHIWNKDE | AATTTGAACCAATCTGAGAATGATATCAAGTTAATC |
| | SKHSKGTPNLHTIYWKML | AAGGATCTGTTAGATGCTTACAAGGCTCTGCAGCAT |
| | FDEKNLTDVIYKLNGQAE | TTCGTCAAACCACTCCTTGGCTCGGGTGACGAGGCT |
| | VFYRKKSLDLNKTTTHKA | GAGAAAGATAACGAGTTCGATGCACGCCTCCGTGCG |
| | HAPITNKNTQNAKKGSVE | GCTTGGAATGCGTTGGACATTGTTACACCACTCTAT |
| | DYDIIKNRRYTVDKFQFH | AACAAGGTTCGGAACTGGCTGACCCGCAAACCATAT |
| | VPITLNFKATGRNYINEH | TCTACAGAAAAAATCAAGCTTAATTTCGAAAACGCC |
| | TQEAIRNNGIEHIIGIDR | CAACTTCTGGGGGGTTGGGATCAGAACAAAGAACCG |
| | GERHLLYLSLIDLKGNIV | GATTGCACATCAGTCCTCCTTCGGAAGGATGGGATG |
| | KQMTLNDIVNEYNGRTYA | TACTATTTAGCGATCATGGATAAAAAGGCGAATCAC |
| | TNYKDLLATREGERTDAR | GCCTTTGACTGTGACTGCTTACCGTCTGACGGGGCC |
| | RNWQKIENIKEIKEGYLS | TGTTTCGAGAAAATTGACTACAAGCTGCTCCCGGGC |
| | QVVHILSKMMVDYKAIVV | GCGAATAAAATGTTGCCGAAAGTTTTTTTTTCTAAA |
| | LEDLNTGEMRNRQKIERQ | AGCCGCATCAAAGAATTTTCCCCTTCGGAATCGATC |
| | VYEKFEKMLIDKLNCYVD | ATCGCTGCTTATAAAAAGGGGACTCATAAAAAAGGG |
| | KQKDADETGGALHPLQLT | CCGAATTTCAGTCTCTCTGATTGTCATCGCTTGATT |
| | NKFESFRKLGKQSGWLFY | GACTTTTTTAAGGCTAGCATTGATAAGCACGAAGAT |
| | IPAWNTSKIDPVTGFVNM | TGGTCAAAATTTCGTTTTCGCTTCTCAGATACCAAA |
| | LDTRYENADKARCFFSKF | ACGTATGAAGACATCAGTGGTTTCTACCGTGAAGTA |
| | DSIRYNADKDWFEFAMDY | GAACAGCAAGGCTATATGCTGGGTTTTCGTAAAGTC |
| | SKFTDKAKDTYTWWTLCS | TCTGAGGCCTTTGTGAATAAACTCGTTGATGAAGGT |
| | YGTRIKTERNPAKNNLWD | AAGTTATACTTATTCCATATCTGGAACAAAGACTTT |
| | NEEVVLTDEFKKVFAAAG | AGTAAGCACTCCAAAGGTACACCTAATCTCCACACT |
| | IDVHENLKEAICALTDKK | ATTTATTGGAAAATGCTCTTCGATGAGAAAAATCTC |
| | YLEPLMRLMTLLVQMRNS | ACTGACGTCATCTACAAACTGAATGGGCAGGCTGAA |
| | ATNSETDYLLSPVADESG | GTATTCTACCGTAAAAAAAGTCTGGATCTTAATAAG |
| | MFYDSREGKETLPKDADA | ACAACTACTCACAAGGCACATGCCCCAATCACCAAT |
| | NGAYNIARKGLWTIRRIQ | AAAAATACCCAAAACGCAAAGAAGGGTAGTGTTTTC |
| | ATNCEEKVNLVLSNREWL | GATTACGATATCATCAAAAATCGTCGCTACACAGTG |
| | QFAQQKPYLNDAAAKRPA | GACAAATTCCAGTTCCACGTCCCTATCACCTTAAAT |
| | ATKKAGQAKKKKASGSGA | TTTAAGGCAACAGGTCGTAATTACATTAATGAGCAC |
| | GSPKKKRKVEDPKKKRKV | ACTCAAGAGGCAATCCGTAATAATGGCATCGAACAT |
| | (SEQ ID NO: 55) | ATCATTGGCATCGACCGTGGGGAGCGTCACTTGCTT |
| | | TACTTGTCGCTCATTGATCTGAAGGGTAATATCGTC |
| | | AAGCAGATGACCCTTAATGATATTGTCAATGAATAT |
| | | AATGGTCGGACTTATGCGACGAACTACAAGGACTTG |
| | | CTGGCAACACGGGAGGGTGAGCGTACGGACGCTCGG |
| | | CGCAACTGGCAGAAGATTGAAAATATTAAAGAAATC |
| | | AAGGAAGGTTACCTTAGCCAGGTGGTGCACATCTTG |
| | | AGTAAAATGATGGTCGACTACAAGGCTATCGTTGTT |
| | | CTGGAAGACTTGAATACAGGCTTCATGCGGAATCGT |
| | | CAAAAAATCGAACGTCAAGTATATGAGAAGTTCGAA |
| | | AAAATGTTAATTGACAAGCTGAACTGCTATGTTGAC |
| | | AAACAAAAGGATGCTGACGAGACGGGCGGTGCCCTC |
| | | CACCCGCTGCAGCTGACAAACAAATTTGAGTCGTTT |
| | | CGTAAGTTAGGTAAGCAGAGTGGTTGGCTTTTTTAC |
| | | ATCCCAGCATGGAACACTTCGAAAATCGACCCAGTT |
| | | ACTGGGTTCGTGAACATGTTAGACACGCGCTACGAG |
| | | AACGCCGATAAGGCGCGGTGTTTCTTCTCGAAATTC |
| | | GATTCCATCCGGTATAACGCTGACAAAGATTGGTTT |
| | | GAGTTTGCTATGGATTACAGTAAGTTCACTGATAAA |
| | | GCGAAAGATACTTACACGTGGTGGACTCTGTGTTCC |
| | | TATGGGACGCGTATTAAAACTTTTCGTAATCCGGCT |
| | | AAGAATAATTTGTGGGATAATGAGGAGGTTGTCCTT |
| | | ACTGATGAGTTCAAGAAAGTTTTCGCAGCGGCAGGT |
| | | ATTGATGTCCATGAGAACCTTAAGGAAGCGATCTGT |
| | | GCTCTGACAGATAAAAAGTATCTTGAACCACTCATG |
| | | CGTCTCATGACCCTGCTCGTTCAAATGCGGAACTCT |
| | | GCTACTAACTCCGAAACAGACTATTTACTTTCACCA |
| | | GTTGCTGACGAGTCAGGGATGTTCTATGACTCCCGC |
| | | GAAGGGAAGGAAACACTGCCAAAAGATGCGGACGCC |
| | | AACGGTGCATATAACATTGCCCGTAAGGGCCTCTGG |
| | | ACCATCCGGCGGATTCAAGCCACCAACTGTGAGGAG |
| | | AAAGTTAACTTAGTCCTCAGTAATCGTGAATGGTTG |
| | | CAGTTTGCCCAGCAGAAACCATATCTGAATGATGCG |
| | | GCCGCAAAAAGGCCGGCGGCCACGAAAAAGGCCGGC |
| | | CAGGCAAAAAAGAAAAAGGCTAGCGGCAGCGGCGCC |
| | | GGATCCCCAAAGAAGAAAAGGAAGGTTGAAGACCCC |
| | | AAGAAAAAGAGGAAGGTGTGATAA (SEQ ID NO: |
| | | 56) |
| ABW 6 | MGHHHHHHSSGLVPRGSG | ATGGGCCACCATCATCATCATCATAGCAGCGGCCTG |
| | TMIYRENFKRKKEKIEMN | GTGCCGCGCGGCAGCGGTACCATGATCTACCGTGAG |
| | TGFNDFTNLSSVIKTLCN | AATTTTAAGCGGAAAAAGGAGAAGATTGAAATGAAC |
| | RLIPTEITAKYIKEHGVI | ACTGGGTTTAATGACTTCACTAATTTGAGTTCCGTG |
| | EADQERNMMSQELKNILN | ACCAAGACGTTATGCAACCGGTTGATCCCAACAGAA |
| | DFYRSFLNENLVKVHELD | ATTACCGCAAAGTACATTAAGGAGCATGGGGTAATT |
| | FKPLFTEMKKYLETKDNK | GAGGCGGACCAAGAACGGAACATGATGAGTCAAGAG |
| | EALEKAQDDMRKAIHDIF | CTGAAAAATATCTTGAATGACTTTTACCGGAGTTTC |
| | ESDDRYKKMFKAEITASI | CTGAACGAGAACCTTGTGAAGGTGCACGAACTTGAT |
| | LPEFILHNGAYSAEEKEE | TTCAAGCCGTTATTCACCGAGATGAAAAAGTACCTC |
| | KMQVVKMENGEMTSFSAF | GAAACAAAAGATAACAAGGAAGCACTCGAAAAGGCC |
| | FTNRENCESKEKISSSAC | CAGGACGACATGCGGAAGGCAATCCATGATATCTTT |
| | YRIVDDNAKIHEDNIRIY | GAAAGTGATGACCGCTACAAAAAAATGTTCAAGGCT |
| | KNIANKEDYEIEMIEKIE | GAGATCACGGCGTCGATTTTGCCTGAATTCATTCTT |
| | EAAGGADIRNIFSYNEDH | CATAACGGGGCATATTCAGCCGAAGAAAAGGAGGAG |
| | FAFNHFVSQDDISFYNYV | AAAATGCAAGTAGTCAAGATGTTCAATGGCTTTATG |
| | VGGINKEMNLYCQATKEK | ACGTCTTTCTCAGCATTCTTTACGAATCGTGAGAAT |
| | LSPYKLRHLHKQILCIEE | TGTTTCTCCAAAGAAAAGATCAGCTCCTCCGCATGT |
| | SLYDVPAKFNCDEDVYAA | TACCGTATTGTTGATGACAACGCGAAAATCCATTTC |
| | VNDFLNNVRTKSVIERLQ | GATAACATTCGTATTTATAAAAATATCGCCAACAAG |
| | MLGKNADSYDLDKIYISK | TTCGATTATGAAATTGAAATGATCGAGAAGATCGAA |
| | KHFTNISQTLYRDESVIN | GAGGCGGCGGGGGGTGCCGACATTCGTAATATCTTC |
| | TALTMSYIDTLPGKGKTK | TCGTACAACTTTGACCACTTTGCATTCAATCATTTC |
| | EKKAASMAKNTELISLGE | GTTAGTCAAGATGATATCTCATTCTACAATTATGTT |
| | IDKLVDKYNLCPDKAAST | GTTGGTGGTATTAACAAGTTTATGAACTTGTATTGT |
| | RSLIRSISDIVADYKANP | CAAGCCACCAAAGAGAAATTATCGCCTTATAAACTG |
| | LTMNSGIPLAENETEIAV | CGTCACCTTCACAAACAGATTCTGTGTATTGAGGAA |
| | LKEAIEPEMDIFRWCAKE | AGCCTCTATGACGTGCCAGCGAAGTTTAATTGTGAT |
| | KTDEPVDKDTDFYTELED | GAGGACGTATATGCAGCTGTCAACGATTTTCTTAAT |
| | INDEIHSIVSLYNRTRNY | AACGTTCGGACGAAATCAGTAATTGAACGCTTGCAA |
| | VTKKPYNTDKFGLYFGTS | ATGCTCGGCAAAAATGCAGACAGTTACGACCTGGAT |
| | SFASGWSESKEFTNNAIL | AAAATTTATATCTCTAAAAAGCACTTCACCAATATC |
| | LAKDDKFYLGVFNAKNKP | TCTCAAACTTTATATCGCGACTTCTCTGTGATCAAC |
| | AKSIIKGHDTIQDGDYKK | ACTGCCCTCACTATGTCTTATATCGATACTCTTCCG |
| | MVYSLLTGPNKMLPHMFI | GGTAAGGGGAAAACCAAGGAAAAAAAGGCAGCATCG |
| | SSSKAVPVYGLTDELLSD | ATGGCCAAAAACACCGAACTTATTTCGTTAGGCGAA |
| | YKKGRHLKTSKNFDIDYC | ATTGATAAGTTGGTGGATAAATATAACCTCTGTCCA |
| | HKLIDYFKHCLALYTDWD | GATAAGGCAGCTAGCACTCGTAGCCTCATTCGGTCT |
| | CFNFKFSDTESYNDIGEF | ATTAGCGACATCGTCGCTGACTACAAGGCAAACCCT |
| | YKEVAEQGYYMNWTYIGS | CTTACAATGAATAGTGGGATTCCGTTGGCAGAGAAC |
| | DDIDSLQENGQLYLFQIY | GAGACAGAAATCGCGGTGTTAAAAGAGGCGATCGAG |
| | NKDESEKSFGKPSKHTAI | CCTTTTATGGATATCTTCCGGTGGTGTGCTAAGTTT |
| | LRSLESDENVADPVIKLC | AAAACCGACGAGCCTGTCGATAAGGATACAGATTTC |
| | GGTEVFFRPKSIKTPVVH | TACACGGAGTTAGAAGACATTAACGATGAAATCCAT |
| | KKGSILVSKTYNAQEMDE | AGTATTGTCAGTCTTTATAACCGGACCCGGAATTAT |
| | NGNIITVRKCVPDDVYME | GTCACTAAAAAGCCGTACAACACAGATAAGTTCGGT |
| | LYGYYNNSGTPLSAEALK | CTGTATTTTGGCACTTCGTCGTTCGCATCGGGTTGG |
| | YKDIVDHRTAPYDIIKDR | AGCGAGAGCAAAGAGTTTACTAACAACGCAATTTTG |
| | RYTEDEFFINMPVSLNYK | TTAGCCAAGGATGACAAGTTTTACCTCGGCGTGTTC |
| | AENRRVNVNEMALKYIAQ | AACGCAAAAAACAAGCCAGCAAAATCGATTATCAAA |
| | TKDTYIIGIDRGERNLLY | GGGCATGACACAATCCAAGATGGTGATTATAAGAAA |
| | VSVIDTDGNIVEQKSLNI | ATGGTGTATTCACTGCTCACCGGGCCAAATAAGATG |
| | INNVDYQAKLKQVEIMRK | CTTCCTCACATGTTTATCTCGAGCAGTAAAGCGGTT |
| | LARQNWKQGVKIADLKKG | CCTGTTTACGGGCTCACTGACGAGCTTCTCAGCGAC |
| | YLSQAVHEVAELVIKYNG | TATAAGAAAGGTCGCCACCTTAAGACATCCAAGAAT |
| | IVVMEDLNSREKEKRSKI | TTCGACATTGATTACTGTCACAAACTTATCGATTAC |
| | ERGVYQQFETSLIKTLNY | TTCAAACATTGTCTCGCTTTGTATACTGATTGGGAT |
| | LTFKDRKPLEAGGIANGY | TGCTTCAACTTCAAATTCTCTGATACGGAGTCCTAC |
| | QLTYIPESLKNVGSQCGC | AATGATATCGGCGAGTTCTACAAAGAGGTTGCCGAG |
| | ILYVPAAYTSKIDPTTGF | CAAGGCTACTACATGAACTGGACATATATCGGGTCG |
| | VTLFKFKDISSEKAKTDE | GACGATATCGATTCGCTGCAGGAAAACGGCCAGCTC |
| | IGREDCIRYDAEKDLFAF | TATCTTTTTCAAATTTATAACAAAGATTTCAGCGAA |
| | EFDYDNFETYETCARTKW | AAGTCATTCGGTAAACCGTCTAAACATACGGCCATC |
| | CAYTYGTRVKKTERNRKF | CTGCGTAGCTTATTCAGCGATGAAAACGTGGCCGAC |
| | VSEVIIDITEEIKKTLAA | CCAGTCATTAAACTGTGTGGGGGGACCGAAGTTTTT |
| | TDINWIDSHDIKQEIIDY | TTCCGGCCGAAGTCTATTAAGACACCAGTAGTACAT |
| | ALSSHIFEMEKLTVQMRN | AAAAAAGGCAGCATCCTCGTATCCAAAACCTATAAC |
| | SLCESKDREYDKFVSPIL | GCACAAGAAATGGACGAGAATGGTAATATCATCACC |
| | NASGKFFDTDAADKSLPI | GTGCGGAAGTGTGTTCCAGACGACGTCTATATGGAG |
| | EADANDAYGIAMKGLYNV | CTCTACGGCTATTACAACAACTCTGGGACGCCTCTG |
| | LQVKNNWAEGEKFKESRL | TCCGCCGAAGCTTTGAAATACAAGGATATTGTGGAC |
| | SNEDWENFMQKRAAAKRP | CACCGCACGGCTCCGTACGACATTATCAAGGACCGG |
| | AATKKAGQAKKKKASGSG | CGTTACACCGAAGACGAATTTTTCATCAACATGCCG |
| | AGSPKKKRKVEDPKKKRK | GTGTCATTGAATTATAAAGCGGAAAACCGCCGTGTT |
| | V (SEQ ID NO: 68) | AATGTGAACGAAATGGCCTTAAAATACATCGCACAG |
| | | ACCAAGGACACCTACATCATTGGCATCGATCGGGGC |
| | | GAACGTAATCTGTTGTATGTGAGCGTTATCGATACT |
| | | GACGGCAATATCGTTGAGCAAAAGAGTCTCAATATC |
| | | ATCAATAACGTGGATTATCAAGCCAAATTAAAGCAA |
| | | GTGGAAATCATGCGTAAACTGGCCCGTCAGAATTGG |
| | | AAGCAGGGGGTAAAGATTGCAGACCTGAAAAAGGGC |
| | | TACCTGTCACAAGCGGTACATGAAGTCGCGGAACTT |
| | | GTAATTAAATACAACGGGATTGTTGTAATGGAGGAC |
| | | TTAAACTCCCGCTTCAAAGAGAAGCGTTCTAAAATT |
| | | GAACGCGGCGTCTACCAACAGTTTGAGACATCATTA |
| | | ATCAAGACATTGAATTATTTGACGTTCAAAGATCGC |
| | | AAACCGTTAGAAGCCGGGGGCATTGCGAATGGTTAT |
| | | CAATTAACTTATATTCCGGAGTCTCTTAAAAATGTG |
| | | GGCTCTCAGTGCGGCTGTATCTTGTATGTGCCAGCA |
| | | GCCTACACCTCGAAGATCGACCCTACCACTGGTTTC |
| | | GTCACCTTGTTCAAATTCAAAGACATTTCGAGCGAG |
| | | AAAGCTAAAACGGATTTTATTGGTCGGTTCGACTGC |
| | | ATCCGTTATGATGCAGAAAAGGACCTTTTCGCATTT |
| | | GAATTCGATTATGACAACTTTGAGACTTATGAGACT |
| | | TGTGCGCGTACCAAATGGTGTGCATATACATACGGG |
| | | ACTCGGGTGAAGAAAACTTTCCGGAATCGGAAATTC |
| | | GTGTCAGAGGTGATCATCGACATCACTGAAGAGATC |
| | | AAGAAGACCCTTGCAGCGACCGATATTAATTGGATT |
| | | GACAGTCACGACATCAAACAAGAGATCATCGACTAT |
| | | GCCCTTAGCAGCCATATTTTTGAAATGTTCAAATTA |
| | | ACGGTACAGATGCGTAACAGCCTTTGCGAGAGTAAA |
| | | GATCGCGAGTACGACAAGTTCGTCTCACCTATTCTC |
| | | AACGCGTCGGGCAAATTTTTCGACACCGATGCCGCT |
| | | GATAAAAGTCTGCCTATTGAAGCTGATGCGAACGAT |
| | | GCGTATGGTATTGCTATGAAAGGGTTGTATAATGTT |
| | | TTACAAGTCAAAAACAACTGGGCGGAGGGCGAGAAA |
| | | TTTAAGTTCTCCCGTTTAAGCAACGAAGATTGGTTC |
| | | AACTTCATGCAAAAGCGGGCGGCCGCAAAAAGGCCG |
| | | GCGGCCACGAAAAAGGCCGGCCAGGCAAAAAAGAAA |
| | | AAGGCTAGCGGCAGCGGCGCCGGATCCCCAAAGAAG |
| | | AAAAGGAAGGTTGAAGACCCCAAGAAAAAGAGGAAG |
| | | GTGTGATAA (SEQ ID NO: 69) |
| ABW 7 | MGHHHHHHSSGLVPRGSL | ATGGGCCACCATCATCATCATCATAGCAGCGGCCTG |
| | QMTMDYGNGQFERRAPLT | GTGCCGCGCGGCAGCCTGCAGATGACAATGGATTAC |
| | KTITLRLKPIGETRETIR | GGTAACGGTCAATTTGAGCGGCGCGCCCCGCTCACC |
| | EQKLLEQDAAFRKLVETV | AAGACAATCACTCTCCGGTTGAAACCGATCGGGGAG |
| | TPIVDDCIRKIADNALCH | ACCCGTGAGACGATTCGCGAGCAAAAGCTCCTCGAA |
| | FGTEYDESCLGNAISKND | CAAGATGCTGCATTCCGTAAACTTGTTGAAACTGTC |
| | SKAIKKETEKVEKLLAKV | ACCCCTATCGTGGATGATTGTATCCGGAAAATTGCT |
| | LTENLPDGLRKVNDINSA | GACAACGCTTTGTGTCATTTTGGCACGGAATATGAT |
| | AFIQDTLTSFVQDDADKR | TTCTCCTGTTTAGGTAATGCCATCTCAAAAAATGAC |
| | VLIQELKGKTVLMQRFLT | AGCAAAGCGATTAAGAAAGAGACCGAAAAAGTAGAG |
| | TRITALTVWLPDRVFENF | AAGCTGTTGGCCAAGGTTCTGACAGAGAACTTGCCA |
| | NIFIENAEKMRILLDSPL | GACGGTCTGCGTAAAGTCAACGATATTAACAGCGCG |
| | NEKIMKEDPDAEQYASLE | GCTTTTATTCAGGACACACTGACATCATTCGTCCAG |
| | FYGQCLSQKDIDSYNLII | GACGATGCTGACAAACGTGTGTTAATTCAAGAGTTA |
| | SGIYADDEVKNPGINEIV | AAGGGCAAAACTGTGTTAATGCAACGCTTTTTAACA |
| | KEYNQQIRGDKDESPLPK | ACCCGGATTACTGCATTGACTGTATGGCTCCCTGAC |
| | LKKLHKQILMPVEKAFFV | CGGGTGTTTGAGAACTTCAACATTTTTATCGAAAAT |
| | RVLSNDSDARSILEKILK | GCTGAAAAGATGCGCATCTTGCTCGACTCACCATTG |
| | DTEMLPSKIIEAMKEADA | AATGAAAAGATCATGAAGTTCGATCCGGATGCTGAA |
| | GDIAVYGSRLHELSHVIY | CAATACGCGAGTTTGGAATTCTATGGTCAATGTCTG |
| | GDHGKLSQIIYDKESKRI | TCCCAGAAGGATATTGATTCGTACAACCTCATCATT |
| | SELMETLSPKERKESKKR | TCCGGGATTTATGCCGATGATGAGGTCAAGAACCCA |
| | LEGLEEHIRKSTYTEDEL | GGTATCAATGAAATTGTTAAGGAATACAACCAGCAA |
| | NRYAEKNVMAAYIAAVEE | ATTCGCGGGGATAAGGATGAGTCACCTTTACCTAAA |
| | SCAEIMRKEKDLRTLLSK | CTGAAAAAGTTGCATAAACAAATTTTGATGCCTGTC |
| | EDVKIRGNRHNTLIVKNY | GAGAAGGCATTTTTCGTTCGGGTACTCAGTAATGAT |
| | FNAWTVERNLIRILRRKS | TCTGATGCTCGTTCAATTTTAGAAAAAATCTTGAAG |
| | EAEIDSDFYDVLDDSVEV | GATACTGAGATGTTGCCTTCTAAGATCATTGAAGCG |
| | LSLTYKGENLCRSYITKK | ATGAAAGAAGCAGACGCTGGGGACATCGCTGTATAT |
| | IGSDLKPEIATYGSALRP | GGTTCACGTTTGCACGAGTTAAGCCACGTAATCTAT |
| | NSRWWSPGEKFNVKFHTI | GGCGATCACGGGAAGCTCTCTCAGATTATCTATGAT |
| | VRRDGRLYYFILPKGAKP | AAGGAGTCGAAACGCATCAGCGAGCTCATGGAAACG |
| | VELEDMDGDIECLQMRKI | TTATCGCCTAAGGAGCGCAAAGAGTCAAAGAAACGC |
| | PNPTIFLPKLVFKDPEAF | TTGGAGGGTCTGGAAGAACATATCCGGAAGTCGACA |
| | FRDNPEADEFVELSGMKA | TATACCTTCGACGAGCTTAATCGTTATGCGGAAAAG |
| | PVTITRETYEAYRYKLYT | AACGTCATGGCTGCCTACATCGCGGCCGTGGAGGAA |
| | VGKLRDGEVSEEEYKRAL | AGCTGCGCCGAAATTATGCGTAAGGAGAAGGACTTA |
| | LQVLTAYKEFLENRMIYA | CGCACGCTTCTTAGTAAGGAGGATGTCAAGATTCGT |
| | DLNFGFKDLEEYKDSSEF | GGTAATCGCCACAATACGTTAATTGTTAAGAACTAC |
| | IKQVETHNTFMCWAKVSS | TTCAATGCCTGGACTGTCTTCCGGAATTTGATCCGC |
| | SQLDDLVKSGNGLLFEIW | ATCCTCCGGCGGAAATCCGAGGCGGAGATCGACTCA |
| | SERLESYYKYGNEKVLRG | GATTTCTATGACGTCTTGGATGACTCTGTGGAAGTT |
| | YEGVLLSILKDENLVSMR | TTATCGCTCACATATAAAGGTGAAAACTTGTGCCGG |
| | TLLNSRPMLVYRPKESSK | TCTTACATTACGAAGAAGATCGGGAGCGATTTAAAG |
| | PMVVHRDGSRVVDREDKD | CCAGAGATTGCTACCTATGGTTCCGCCTTGCGCCCT |
| | GKYIPPEVHDELYRFENN | AATTCACGGTGGTGGTCACCGGGCGAGAAGTTTAAC |
| | LLIKEKLGEKARKILDNK | GTAAAGTTCCACACCATTGTTCGCCGGGACGGTCGC |
| | KVKVKVLESERVKWSKFY | CTTTATTATTTCATCTTGCCGAAAGGTGCCAAACCT |
| | DEQFAVTFSVKKNADCLD | GTCGAGCTCGAAGATATGGATGGGGACATCGAATGC |
| | TTKDLNAEVMEQYSESNR | TTGCAAATGCGCAAGATTCCGAATCCGACTATTTTC |
| | LILIRNTTDILYYLVLDK | CTTCCAAAATTGGTTTTCAAGGACCCAGAGGCCTTC |
| | NGKVLKQRSLNIINDGAR | TTCCGCGACAATCCAGAGGCAGATGAATTCGTTTTT |
| | DVDWKERFRQVTKDRNEG | CTTTCGGGTATGAAAGCTCCAGTGACCATCACGCGT |
| | YNEWDYSRTSNDLKEVYL | GAAACCTATGAGGCGTATCGCTACAAACTTTATACA |
| | NYALKEIAEAVIEYNAIL | GTTGGGAAGTTACGCGACGGTGAAGTGAGCGAAGAA |
| | IIEKMSNAFKDKYSELDD | GAGTATAAACGTGCGTTGTTACAAGTATTGACCGCC |
| | VTFKGFETKLLAKLSDLH | TATAAGGAATTCTTAGAGAATCGGATGATCTACGCA |
| | FRGIKDGEPCSFTNPLQL | GATCTGAACTTTGGCTTTAAAGATCTCGAAGAATAC |
| | CQNDSNKILQDGVIFMVP | AAAGACTCGTCAGAATTTATCAAACAAGTCGAAACT |
| | NSMTRSLDPDTGFIFAIN | CACAACACTTTTATGTGCTGGGCTAAGGTCAGTAGC |
| | DHNIRTKKAKLNELSKED | AGTCAGCTCGACGACCTGGTCAAGAGCGGGAACGGG |
| | QLKVSSEGCLIMKYSGDS | TTACTGTTCGAAATCTGGTCAGAACGGTTGGAGTCC |
| | LPTHNTDNRVWNCCCNHP | TATTACAAATATGGCAACGAGAAGGTGCTGCGTGGG |
| | ITNYDRETKKVEFIEEPV | TACGAGGGCGTTCTTTTGAGTATCCTTAAGGACGAG |
| | EELSRVLEENGIETDTEL | AACCTCGTGAGCATGCGGACGCTGCTTAATTCTCGG |
| | NKLNERENVPGKVVDAIY | CCGATGCTCGTCTACCGCCCTAAAGAATCATCCAAG |
| | SLVLNYLRGTVSGVAGQR | CCGATGGTCGTTCACCGGGACGGTAGCCGCGTCGTT |
| | AVYYSPVTGKKYDISFIQ | GATCGGTTCGATAAGGATGGGAAGTATATTCCACCA |
| | AMNLNRKCDYYRIGSKER | GAGGTACACGACGAATTATACCGGTTCTTTAACAAT |
| | GEWTDFVAQLINAAAKRP | TTGCTTATTAAGGAAAAGCTCGGCGAGAAAGCGCGC |
| | AATKKAGQAKKKKASGSG | AAAATTTTAGACAACAAAAAAGTAAAAGTAAAGGTA |
| | AGSPKKKRKVEDPKKKRK | TTGGAATCTGAACGTGTAAAGTGGTCAAAGTTTTAT |
| | V (SEQ ID NO: 81) | GATGAACAGTTTGCAGTTACATTCTCTGTTAAAAAG |
| | | AATGCAGACTGTCTGGATACCACGAAAGATCTCAAT |
| | | GCCGAAGTTATGGAGCAGTATTCCGAATCGAACCGG |
| | | CTTATCCTGATCCGCAATACCACTGACATCTTGTAT |
| | | TATCTTGTACTTGATAAGAATGGGAAAGTGCTGAAA |
| | | CAACGCTCATTGAATATCATTAACGACGGGGCTCGC |
| | | GACGTTGATTGGAAAGAGCGTTTTCGGCAGGTAACA |
| | | AAAGATCGTAACGAAGGCTATAACGAGTGGGACTAC |
| | | TCGCGGACTAGCAACGATTTGAAAGAGGTCTATCTG |
| | | AATTATGCATTGAAGGAGATTGCCGAAGCGGTAATC |
| | | GAATACAACGCAATTTTGATTATTGAAAAAATGTCG |
| | | AATGCCTTCAAGGATAAGTACTCCTTTTTGGATGAT |
| | | GTTACCTTCAAAGGTTTTGAGACCAAACTTCTTGCG |
| | | AAGCTCTCTGACTTGCATTTCCGGGGTATTAAAGAT |
| | | GGGGAGCCATGTTCGTTTACGAACCCGTTACAGTTA |
| | | TGTCAGAACGACTCAAACAAAATTTTACAAGACGGT |
| | | GTGATTTTCATGGTCCCTAACAGCATGACGCGCAGT |
| | | CTGGACCCTGACACTGGGTTCATTTTTGCGATTAAC |
| | | GATCACAACATCCGCACTAAGAAAGCGAAGTTAAAC |
| | | TTCCTTAGTAAATTCGATCAGCTGAAAGTGTCATCA |
| | | GAGGGCTGTTTAATCATGAAATATTCGGGGGACTCC |
| | | CTTCCTACACACAACACAGATAATCGTGTATGGAAC |
| | | TGTTGTTGCAATCACCCGATCACCAACTACGACCGC |
| | | GAGACGAAAAAGGTCGAATTCATCGAGGAGCCAGTG |
| | | GAAGAGTTGAGTCGCGTCTTAGAAGAGAATGGGATT |
| | | GAGACAGATACGGAACTTAACAAGCTTAACGAGCGC |
| | | GAGAATGTTCCGGGCAAGGTAGTAGATGCCATCTAT |
| | | TCTCTGGTGTTGAATTACTTGCGTGGTACCGTGTCC |
| | | GGCGTTGCAGGCCAACGGGCGGTCTACTATTCCCCT |
| | | GTGACGGGGAAAAAATATGATATTTCGTTTATCCAA |
| | | GCAATGAATCTGAATCGTAAGTGCGATTACTACCGG |
| | | ATCGGGAGCAAAGAACGCGGCGAATGGACGGATTTT |
| | | GTAGCGCAGTTAATTAACGCGGCCGCAAAAAGGCCG |
| | | GCGGCCACGAAAAAGGCCGGCCAGGCAAAAAAGAAA |
| | | AAGGCTAGCGGCAGCGGCGCCGGATCCCCAAAGAAG |
| | | AAAAGGAAGGTTGAAGACCCCAAGAAAAAGAGGAAG |
| | | GTGTGATAA (SEQ ID NO: 82) |
| ABW8 | MGHHHHHHSSGLVPRGSG | ATGGGCCACCATCATCATCATCATAGCAGCGGCCTG |
| | TMCYDLNNIKTKLREREV | GTGCCGCGCGGCAGCGGTACCATGTGCTACGACTTA |
| | ETMGNNMDNSFEPFIGGN | AACAACATCAAGACAAAGTTACGTGAACGCGAAGTC |
| | SVSKTLRNELRVGSEYTG | GAAACTATGGGCAATAACATGGATAATAGCTTCGAG |
| | KHIKECAIIAEDAVKAEN | CCTTTTATTGGCGGTAATAGTGTCTCTAAAACACTT |
| | QYIVKEMMDDFYRDFINR | CGGAATGAGCTGCGTGTAGGTTCCGAATATACTGGT |
| | KLDALQGINWEQLEDIMK | AAACACATTAAAGAGTGCGCGATCATTGCAGAGGAC |
| | KAKLDKSNKVSKELDKIQ | GCCGTGAAGGCGGAGAACCAGTACATCGTAAAAGAG |
| | ESTRKEIGKIFSSDPIYK | ATGATGGACGACTTTTACCGTGACTTCATTAATCGC |
| | DMLKADMISKILPEYIVD | AAACTTGACGCCTTGCAGGGTATTAATTGGGAGCAG |
| | KYGDAASRIEAVKVFYGF | CTTTTTGACATTATGAAGAAGGCGAAATTGGATAAG |
| | SGYFIDEWASRKNVESDK | TCGAATAAAGTCAGCAAAGAGTTAGACAAGATTCAA |
| | NIASAIPHRIVNVNARIH | GAGTCTACGCGGAAAGAAATCGGGAAAATCTTCTCA |
| | LDNITAFNRIAEIAGDEV | TCCGATCCAATCTATAAAGACATGCTCAAAGCGGAC |
| | AGIAEDACAYLQNMSLED | ATGATCAGCAAAATTCTGCCAGAGTATATTGTCGAC |
| | VFTGACYGEFICQKDIDR | AAATACGGTGATGCAGCCTCGCGGATCGAAGCTGTA |
| | YNNICGVINQHMNQYCQN | AAGGTGTTTTACGGCTTTTCGGGTTATTTTATCGAC |
| | KKISRSKFKMERLHKQIL | TTCTGGGCATCGCGCAAGAACGTCTTCTCAGATAAG |
| | CRSESGFEIPIGFQTDGE | AACATCGCGTCGGCCATTCCGCACCGGATTGTCAAT |
| | VIDAINSESTILEEKDIL | GTGAACGCTCGGATCCATCTGGACAACATCACGGCC |
| | DRLRTLSQEVTGYDMERI | TTCAACCGTATCGCAGAAATTGCAGGGGATGAAGTC |
| | YVSSKAFESVSKYIDHKW | GCCGGCATTGCTGAAGATGCTTGTGCTTACCTGCAG |
| | DVIASSMYNYFSGAVRGK | AATATGAGCTTAGAGGATGTATTCACGGGGGCCTGC |
| | DDKKDVKIQTEIKKIKSC | TACGGTGAGTTCATCTGTCAGAAGGATATTGATCGT |
| | SLLDLKKLVDMYYKMDGM | TACAATAACATTTGCGGTGTTATCAACCAGCACATG |
| | CLEHEATEYVAGITEILV | AATCAATACTGCCAAAACAAAAAGATCTCACGCTCA |
| | DENYKTFDMDDSVKMIQN | AAATTTAAGATGGAACGTCTGCACAAACAGATCTTA |
| | EHMINEIKEYLDTYMSIY | TGTCGCTCTGAGAGTGGTTTTGAGATCCCGATTGGG |
| | HWAKDEMIDELVDRDMEF | TTTCAAACCGACGGGGAGGTAATCGATGCTATCAAC |
| | YSELDEIYYDLSDIVPLY | TCCTTTTCTACGATTCTTGAAGAGAAAGATATCTTG |
| | NKVRNYVTQKPYSQDKIK | GATCGTCTGCGCACTTTGTCGCAGGAGGTAACAGGT |
| | LNFGSPTLANGWSKSKEF | TATGACATGGAGCGTATCTATGTAAGTTCCAAGGCG |
| | DNNVVVLLRDEKIYLAIL | TTTGAGTCTGTATCAAAGTACATCGATCACAAATGG |
| | NVGNKPSKDIMAGEDRRR | GACGTAATTGCTTCTTCCATGTACAATTACTTTTCT |
| | SDTDYKKMNYYLLPGASK | GGGGCTGTTCGTGGGAAGGACGACAAGAAAGATGTC |
| | TLPHVFISSNAWKKSHGI | AAGATTCAGACGGAAATTAAAAAGATTAAGTCATGT |
| | PDEIMYGYNQNKHLKSSP | TCGTTATTGGACCTCAAAAAGCTGGTAGATATGTAT |
| | NFDLEFCRKLIDYYKECI | TATAAAATGGATGGGATGTGTTTAGAGCACGAAGCG |
| | DSYPNYQIENFKFAATET | ACGGAGTACGTGGCAGGTATTACGGAGATCCTGGTT |
| | YNDISEFYKDVERQGYKI | GACTTTAACTATAAGACCTTCGACATGGATGATTCC |
| | EWSYISEDDINQMDRDGQ | GTTAAGATGATTCAAAATGAGCACATGATTAATGAA |
| | IYLFQIYNKDFAPNSKGM | ATTAAAGAATATTTAGATACCTATATGTCTATCTAT |
| | QNLHTLYLKNIFSEENLS | CATTGGGCGAAGGACTTTATGATCGATGAGCTCGTA |
| | DVVIKLNGEAELFFRKSS | GATCGCGACATGGAATTCTACAGTGAGCTCGATGAA |
| | IQHKRGHKKGSVLVNKTY | ATCTATTATGATTTGTCCGACATCGTACCACTGTAT |
| | KTTEKTENGQGEIEVIES | AATAAAGTCCGCAACTACGTCACGCAAAAACCGTAT |
| | VPDQCYLELVKYWSEGGV | TCCCAGGATAAAATCAAGTTAAACTTTGGCAGCCCA |
| | GQLSEEASKYKDKVSHYA | ACCTTAGCAAACGGTTGGAGCAAGTCGAAAGAATTT |
| | ATMDIVKDRRYTEDKFFI | GATAACAACGTTGTAGTATTGTTGCGTGACGAAAAG |
| | HMPITINFKADNRNNVNE | ATTTATCTGGCCATCTTAAATGTGGGGAATAAACCG |
| | KVLKFIAENDDLHVIGID | TCAAAGGATATCATGGCGGGCGAAGACCGTCGTCGC |
| | RGERNLLYVSVIDSRGRI | TCCGATACTGATTACAAGAAAATGAATTACTATCTG |
| | VEQKSENIVENYESSKNV | CTCCCTGGGGCAAGCAAAACCCTGCCACACGTTTTT |
| | IRRHDYRGKLVNKEHYRN | ATCTCTTCAAATGCATGGAAGAAATCCCACGGTATC |
| | EARKSWKEIGKIKEIKEG | CCTGACGAGATTATGTACGGCTATAACCAAAATAAG |
| | YLSQVIHEISKLVLKYNA | CATTTAAAATCTTCGCCAAACTTCGACTTAGAGTTT |
| | IIVMEDLNYGFKRGREKV | TGTCGCAAGCTGATCGATTATTACAAAGAATGTATT |
| | ERQVYQKFETMLINKLAY | GACAGCTATCCTAACTATCAGATCTTCAATTTCAAA |
| | LVDKSRAVDEPGGLLKGY | TTCGCCGCTACGGAAACTTACAACGATATTTCGGAG |
| | QLTYVPDNLGELGSQCGI | TTCTACAAAGATGTTGAACGTCAGGGGTACAAGATT |
| | IFYVPAAYTSKIDPVTGF | GAATGGTCGTACATTTCCGAGGACGATATTAATCAG |
| | VDVEDFKAYSNAEARLDE | ATGGATCGTGACGGCCAGATTTATCTTTTTCAAATC |
| | INKLDCIRYDAPRNKFEI | TACAACAAGGATTTTGCCCCAAACTCTAAGGGCATG |
| | AFDYGNERTHHTTLAKTS | CAGAATTTACATACACTCTATTTAAAAAATATTTTT |
| | WTIFIHGDRIKKERGSYG | TCAGAGGAAAACCTCTCTGATGTCGTCATTAAACTG |
| | WKDEIIDIEARIRKLFED | AATGGCGAGGCTGAGCTCTTCTTCCGCAAGAGCTCG |
| | TDIEYADGHNLIGDINEL | ATCCAACATAAACGCGGTCATAAGAAGGGTAGTGTG |
| | ESPIQKKFVGELFDIIRE | TTGGTAAATAAGACCTATAAAACCACAGAAAAAACT |
| | TVQLRNSKSEKYDGTEKE | GAAAATGGTCAAGGCGAAATTGAAGTAATCGAGAGC |
| | YDKIISPVMDEEGVFFTT | GTGCCGGACCAGTGTTACCTGGAGCTTGTTAAGTAC |
| | DSYIRADGTELPKDADAN | TGGTCAGAGGGTGGTGTAGGTCAGTIGTCAGAAGAG |
| | GAYCIALKGLYDVLAVKK | GCTTCCAAATACAAAGATAAAGTCAGCCACTACGCT |
| | YWKEGEKFDRKLLAITNY | GCAACAATGGATATTGTCAAGGACCGGCGGTACACG |
| | NWFDFIQNRRFAAAKRPA | GAGGATAAGTTCTTTATTCACATGCCGATTACGATT |
| | ATKKAGQAKKKKASGSGA | AATTTTAAAGCTGATAACCGGAACAATGTCAACGAG |
| | GSPKKKRKVEDPKKKRKV | AAAGTGCTGAAGTTTATTGCAGAAAACGATGATCTC |
| | (SEQ ID NO: 94) | CACGTTATTGGTATTGACCGTGGGGAACGTAATCTC |
| | | CTGTACGTCTCAGTAATTGATTCACGTGGGCGTATT |
| | | GTTGAGCAGAAGTCGTTTAATATTGTTGAGAATTAC |
| | | GAGAGCAGTAAAAATGTGATCCGCCGCCATGATTAT |
| | | CGTGGGAAATTAGTAAATAAAGAGCACTATCGTAAT |
| | | GAGGCACGTAAGAGCTGGAAAGAAATCGGCAAAATC |
| | | AAGGAGATCAAAGAAGGTTATCTCAGTCAAGTTATC |
| | | CATGAGATTAGTAAGTTGGTATTAAAGTATAACGCC |
| | | ATCATCGTGATGGAAGATCTTAATTATGGCTTCAAA |
| | | CGCGGGCGGTTTAAAGTCGAGCGGCAGGTATACCAG |
| | | AAGTTCGAGACCATGCTTATTAACAAATTAGCCTAC |
| | | TTAGTGGACAAATCACGCGCGGTAGACGAACCGGGT |
| | | GGGTTATTAAAAGGCTACCAGCTGACATACGTGCCA |
| | | GATAACTTGGGTGAACTGGGGTCCCAGTGCGGGATC |
| | | ATTTTTTATGTGCCAGCAGCATACACTTCGAAAATC |
| | | GATCCTGTTACGGGCTTTGTAGACGTGTTTGATTTT |
| | | AAGGCATACTCCAATGCCGAAGCACGTTTAGATTTC |
| | | ATCAATAAACTGGACTGCATCCGGTATGACGCGCCG |
| | | CGTAACAAGTTTGAAATTGCTTTCGACTACGGTAAC |
| | | TTCCGGACTCATCATACAACCCTTGCAAAGACTAGC |
| | | TGGACTATTTTTATTCACGGCGACCGTATTAAAAAG |
| | | GAGCGCGGTTCTTACGGCTGGAAGGACGAAATTATC |
| | | GATATCGAGGCCCGTATTCGTAAGCTGTTTGAAGAC |
| | | ACAGACATCGAATACGCCGATGGTCACAATTTGATC |
| | | GGTGACATTAACGAGCTCGAGAGTCCAATTCAAAAG |
| | | AAATTCGTTGGTGAGCTGTTCGACATTATCCGTTTC |
| | | ACTGTCCAACTGCGCAACAGCAAAAGTGAGAAATAT |
| | | GACGGCACCGAAAAGGAGTATGACAAAATTATTTCG |
| | | CCGGTAATGGACGAGGAGGGGGTTTTCTTTACAACC |
| | | GACAGTTATATCCGCGCAGATGGTACTGAATTACCT |
| | | AAAGATGCTGATGCTAACGGGGCCTATTGTATCGCG |
| | | CTGAAGGGTCTTTACGACGTGCTCGCGGTAAAGAAA |
| | | TATTGGAAGGAGGGGGAGAAGTTCGATCGGAAGTTA |
| | | CTTGCCATCACCAATTACAACTGGTTTGATTTCATT |
| | | CAGAATCGTCGCTTCGCGGCCGCAAAAAGGCCGGCG |
| | | GCCACGAAAAAGGCCGGCCAGGCAAAAAAGAAAAAG |
| | | GCTAGCGGCAGCGGCGCCGGATCCCCAAAGAAGAAA |
| | | AGGAAGGTTGAAGACCCCAAGAAAAAGAGGAAGGTG |
| | | TGATAA (SEQ ID NO: 95) |
| ABW9 | MGHHHHHHSSGLVPRGSG | ATGGGGCATCACCACCACCACCACTCGTCGGGTCTT |
| | TMSDRLDVLTNQYPLSKT | GTTCCACGTGGTTCTGGTACCATGTCTGATCGCCTG |
| | LRFELKPVGATADWIRKH | GACGTGCTTACTAACCAATACCCATTATCGAAAACT |
| | NVIRYHNGKLVGKDAIRE | TTGCGCTTCGAATTGAAGCCGGTTGGAGCCACAGCT |
| | QNYKYLKKMLDEMHRLFL | GACTGGATTCGCAAACACAACGTTATCCGCTATCAT |
| | QQALVLEPNSNQAQELTA | AATGGTAAACTGGTTGGAAAGGATGCGATCCGTTTT |
| | LLRAIENNYCNNNDLLAG | CAAAATTATAAGTATCTGAAGAAAATGCTTGATGAG |
| | DYPSLSTDKTIKISNGLS | ATGCATCGCTTATTTCTTCAGCAAGCACTGGTGTTG |
| | KLTTDLFDKKFEDWAYQY | GAGCCAAATAGCAACCAGGCGCAGGAGTTGACCGCA |
| | KEDMPNFWRQDIAELEQK | CTGCTGCGTGCTATTGAGAATAATTATTGCAACAAC |
| | LQVSANAKDQKFYKGIIK | AACGACCTGCTGGCGGGCGATTATCCCAGCCTCTCT |
| | KLKNKIQKSELKAETHKG | ACCGATAAGACCATTAAAATCAGCAACGGCCTTAGC |
| | LYSPTESLQLLEWLVRRG | AAGCTGACCACGGATCTGTTCGATAAGAAGTTCGAA |
| | DIKLTYLEIGKENEKLNE | GACTGGGCATACCAATACAAAGAAGATATGCCCAAT |
| | LVPLVELKDIHRNENNFA | TTCTGGCGTCAAGATATTGCGGAATTAGAGCAAAAG |
| | TYLSGFSKNRENVYSTKE | CTTCAGGTGAGTGCGAACGCAAAAGATCAAAAGTTC |
| | DRRSGYKATSVIARTFEQ | TACAAAGGGATCATCAAGAAGCTGAAGAATAAGATC |
| | NLMFCLGNIAKWHKVTEF | CAGAAGTCTGAACTGAAAGCGGAAACGCACAAGGGC |
| | INQANNYELLQEHGIDWN | TTATACTCACCTACGGAGTCACTGCAACTGCTGGAG |
| | KQIAALEHKLDVCLAEFF | TGGCTGGTACGTCGTGGCGATATTAAACTGACTTAC |
| | ALNNFSQTLAQQGIEKYN | TTAGAGATTGGTAAAGAGAACGAGAAACTTAATGAA |
| | QVLAGIAEIAGQPKTQGL | CTGGTCCCGCTGGTCGAACTTAAGGACATTCATCGC |
| | NELINLARQKLSAKRSQL | AATTTCAATAATTTCGCCACATATCTTTCTGGCTTC |
| | PTLQLLYKQILSKGDKPF | AGCAAGAATCGTGAGAATGTGTACTCAACCAAATTT |
| | IDDEKSDQELIAELNEFV | GATCGTCGTTCGGGTTATAAAGCCACCAGTGTAATC |
| | SSQIHGEHGAIKLINHEL | GCACGCACGTTCGAACAGAATTTAATGTTCTGTCTT |
| | ESFINEARAAQQQIYVPK | GGTAACATTGCCAAGTGGCACAAGGTGACAGAATTC |
| | DKLTELSLLLTGSWQAIN | ATCAACCAGGCGAACAATTACGAGCTCCTGCAGGAG |
| | QWRYKLFDQKQLDKQQKQ | CACGGCATCGATTGGAATAAGCAAATTGCCGCGCTG |
| | YSFSLAQVERWLATEVEQ | GAACACAAACTGGACGTGTGTCTCGCAGAGTTCTTC |
| | QNFYQTEKERQQHKDTQP | GCGCTTAATAACTTCTCACAAACCCTTGCACAACAG |
| | ANVTTSSDGHSILTAFEQ | GGTATCGAAAAGTATAACCAGGTCTTGGCCGGCATC |
| | QVQTLLTNICVAAEKYRQ | GCCGAGATTGCAGGCCAACCCAAGACCCAGGGCCTG |
| | LSDNLTAIDKQRESESSK | AACGAACTCATTAACCTGGCCCGTCAGAAATTGTCT |
| | GFEQIAVIKTLLDACNEL | GCCAAACGCTCACAACTGCCTACGTTGCAACTCCTT |
| | NHFLARFTVNKKDKLPED | TACAAACAAATCTTAAGCAAGGGTGATAAGCCATTC |
| | RAEFWYEKLQAYIDAFPI | ATCGACGATTTTAAAAGCGACCAAGAGTTGATCGCC |
| | YELYNKVRNYLSKKPEST | GAATTAAATGAGTTTGTAAGCAGCCAGATTCACGGA |
| | EKVKINFDNSHFLSGWTA | GAGCATGGTGCAATCAAATTAATTAATCACGAACTT |
| | DYERHSALLEKENENYLL | GAAAGCTTTATCAATGAAGCCCGTGCAGCGCAGCAA |
| | GVVNENLSSEEEEKLKLV | CAGATTTATGTGCCCAAGGACAAGCTTACCGAATTA |
| | GGEEHAKRFIYDFQKIDN | AGTCTTCTCTTAACGGGCAGTTGGCAAGCTATTAAT |
| | SNPPRVFIRSKGSSFAPA | CAATGGCGTTACAAACTGTTCGACCAGAAACAGCTG |
| | VEKYQLPIGDIIDIYDQG | GATAAACAACAGAAACAATATTCATTTAGCCTGGCC |
| | KFKTEHKKKNEAEFKDSL | CAGGTTGAACGCTGGCTGGCAACTGAGGTTGAGCAA |
| | VRLIDYFKLGFSRHDSYK | CAAAACTTCTACCAAACCGAAAAGGAGCGCCAGCAG |
| | HYPFKWKASHQYSDIAEF | CATAAAGATACGCAGCCGGCGAACGTCACCACCAGC |
| | YAHTASFCYTLKEENINF | AGCGATGGACACAGCATTTTAACAGCATTTGAGCAA |
| | NVLRELSSAGKVYLFEIY | CAGGTGCAGACCTTATTAACCAACATCTGTGTTGCT |
| | NKDFSKNKRGQGRDNLHT | GCCGAGAAATATCGCCAATTAAGTGATAATCTCACA |
| | SYWKLLESAENLKDVVLK | GCCATCGATAAACAACGCGAGAGCGAATCAAGTAAG |
| | LNGQAEIFYRPASLAETK | GGATTCGAGCAAATCGCGGTGATTAAAACCTTGCTG |
| | AYTHKKGEVLKHKAYSKV | GACGCGTGTAACGAGCTGAATCACTTTCTGGCACGC |
| | WEALDSPIGTRLSWDDAL | TTCACGGTCAACAAGAAGGACAAACTCCCCGAAGAT |
| | KIPSITEKTNHNNQRVVQ | CGCGCAGAATTTTGGTATGAAAAGTTACAAGCGTAC |
| | YNGQEIGRKAEFAIIKNR | ATTGACGCGTTTCCGATCTACGAGCTGTATAATAAA |
| | RYSVDKFLFHCPITLNEK | GTGCGTAATTACTTAAGCAAGAAGCCGTTTAGCACT |
| | ANGQDNINARVNQFLANN | GAGAAAGTCAAAATTAATTTTGACAATTCCCATTTC |
| | KKINIIGIDRGEKHLLYI | CTGTCGGGTTGGACGGCGGACTATGAGCGTCACAGC |
| | SVINQQGEVLHQESENTI | GCCTTATTATTCAAATTTAATGAAAATTACCTGCTG |
| | TNSYQTANGEKRQVVTDY | GGTGTAGTGAATGAGAACTTAAGCAGCGAGGAAGAA |
| | HQKLDMSEDKRDKARKSW | GAAAAGCTGAAGCTCGTGGGCGGCGAAGAACATGCC |
| | STIENIKELKAGYLSHVV | AAGCGCTTCATTTATGATTTTCAGAAAATCGACAAC |
| | HRLAQLIIEFNAIVALED | TCAAACCCACCGCGCGTTTTCATTCGTAGCAAGGGG |
| | LNHGFKRGRFKIEKQVYQ | TCATCGTTCGCACCTGCGGTCGAAAAGTATCAGTTA |
| | KFEKALIDKLSYLAFKDR | CCGATTGGCGATATCATTGACATTTACGATCAGGGT |
| | TSCLETGHYLNAFQLTSK | AAATTTAAGACAGAACACAAGAAGAAGAATGAGGCC |
| | FKGFNNLGKQSGILFYVN | GAGTTTAAAGACAGTCTGGTACGTTTGATCGATTAT |
| | ADYTSTTDPLTGYIKNVY | TTTAAGCTGGGCTTCTCTCGCCATGACAGCTATAAG |
| | KTYSSVKDSTEFWQRENS | CACTACCCATTCAAGTGGAAAGCCAGTCATCAATAT |
| | IRYIASENRFEFSYDLAD | AGCGACATTGCGGAATTTTACGCTCATACCGCCTCA |
| | LKQKSLESKTKQTPLAKT | TTTTGTTACACGCTTAAGGAAGAAAACATCAATTTT |
| | QWTVSSHVTRSYYNQQTK | AACGTTCTGCGTGAGTTGTCGTCGGCGGGCAAAGTA |
| | QHELFEVTARIQQLLSKA | TATCTCTTCGAAATTTACAATAAGGATTTCTCAAAG |
| | EISYQHQNDLIPALASCQ | AACAAGCGCGGCCAAGGACGCGACAACTTGCATACC |
| | SKALHKELIWLENSILTM | AGTTATTGGAAGTTGCTGTTCTCGGCTGAGAACCTG |
| | RVTDSSKPSATSENDFIL | AAGGATGTTGTGCTGAAATTAAACGGCCAAGCGGAG |
| | SPVAPYFDSRNLNKQLPE | ATCTTTTACCGCCCAGCGTCTTTGGCCGAAACCAAG |
| | NGDANGAYNIARKGIMLL | GCCTACACCCATAAGAAAGGGGAAGTACTGAAACAT |
| | ERIGDFVPEGNKKYPDLL | AAGGCTTATAGCAAAGTGTGGGAAGCCCTGGATTCT |
| | IRNNDWQNFVQRPEMVNK | CCCATTGGCACCCGCCTGAGCTGGGACGATGCTTTA |
| | QKKKLVKLKTEYSNGSLF | AAGATCCCGTCTATTACCGAGAAGACCAATCACAAT |
| | NDLAFKAAAKRPAATKKA | AATCAGCGTGTTGTCCAGTACAACGGCCAAGAAATT |
| | GQAKKKKASGSGAGSPKK | GGCCGCAAAGCGGAGTTCGCTATTATCAAGAACCGC |
| | KRKVEDPKKKRKV (SEQ | CGTTATTCCGTCGATAAATTCCTCTTTCACTGCCCG |
| | ID NO: 107) | ATTACACTCAACTTCAAGGCGAACGGCCAGGACAAC |
| | | ATTAACGCACGCGTTAATCAATTCCTGGCAAATAAC |
| | | AAGAAGATCAACATTATTGGAATTGACCGTGGTGAA |
| | | AAGCATTTACTGTATATCAGCGTGATTAATCAACAA |
| | | GGCGAAGTCCTGCATCAGGAAAGCTTCAATACAATC |
| | | ACGAATTCATATCAGACCGCCAATGGCGAGAAACGC |
| | | CAAGTAGTCACTGACTATCACCAGAAGTTGGACATG |
| | | AGCGAGGACAAACGCGATAAAGCACGTAAGAGCTGG |
| | | AGTACAATCGAAAATATCAAAGAGCTGAAGGCGGGG |
| | | TATCTGAGCCACGTTGTACATCGCCTCGCGCAACTG |
| | | ATTATCGAATTTAATGCCATTGTTGCGTTGGAAGAT |
| | | CTTAACCACGGGTTCAAACGCGGACGTTTTAAAATC |
| | | GAAAAGCAAGTGTATCAGAAGTTCGAAAAGGCGCTG |
| | | ATCGACAAATTGAGCTACTTAGCGTTTAAGGATCGC |
| | | ACGTCGTGTCTGGAAACTGGACATTACTTGAATGCC |
| | | TTTCAATTAACCTCAAAGTTCAAAGGCTTTAACAAC |
| | | CTTGGCAAGCAATCCGGGATTTTGTTCTACGTTAAC |
| | | GCCGATTACACGAGCACCACGGATCCCTTAACAGGC |
| | | TATATTAAGAACGTATACAAAACCTACTCCTCGGTG |
| | | AAGGATTCGACCGAATTTTGGCAGCGCTTTAACTCT |
| | | ATCCGCTATATTGCGAGCGAGAACCGTTTTGAATTT |
| | | AGCTACGACTTAGCGGACCTGAAACAGAAGTCGCTC |
| | | GAGAGTAAAACCAAACAGACCCCTCTCGCCAAGACC |
| | | CAATGGACGGTCTCTAGCCACGTTACCCGTTCCTAT |
| | | TACAACCAGCAGACGAAGCAACATGAGTTATTCGAA |
| | | GTGACAGCGCGCATTCAGCAATTGCTTAGCAAAGCA |
| | | GAAATCAGCTATCAACATCAAAACGACTTGATCCCT |
| | | GCGTTAGCATCATGTCAAAGTAAGGCGTTACACAAG |
| | | GAGTTGATTTGGCTGTTCAACAGCATCCTGACTATG |
| | | CGCGTCACGGACTCAAGCAAACCGTCCGCGACCTCG |
| | | GAGAATGATTTTATCCTGAGCCCGGTAGCGCCGTAC |
| | | TTCGACTCCCGCAATCTGAATAAGCAGCTGCCGGAA |
| | | AACGGCGACGCGAACGGCGCATACAATATCGCTCGT |
| | | AAAGGTATCATGCTTCTGGAACGTATCGGGGACTTC |
| | | GTCCCGGAAGGTAACAAGAAGTACCCCGATTTACTG |
| | | ATCCGCAATAATGACTGGCAGAATTTTGTACAACGC |
| | | CCGGAGATGGTGAACAAGCAGAAGAAGAAACTCGTG |
| | | AAGTTGAAAACGGAATACTCTAATGGCAGCCTCTTC |
| | | AATGATTTGGCGTTTAAGGCCGCAGCTAAGCGCCCC |
| | | GCCGCGACTAAGAAAGCGGGTCAAGCGAAGAAGAAG |
| | | AAAGCGTCGGGGTCGGGAGCGGGCAGTCCGAAGAAG |
| | | AAGCGTAAAGTAGAGGATCCGAAGAAGAAACGCAAA |
| | | GTATAATAA (SEQ ID NO: 108) |

[0105] In some embodiments, nuclease constructs disclosed herein can have a polypeptide sequence having at least 8500 homology to the polypeptide represented by SEQ ID NO: 94 (ABW8), 29 (ABW3), 81 (ABW7), 107 (ABW9), 3 (ABW1), 16 (ABW2), 42 (ABW4), 55 (ABW5), and/or 68 (AWBW6). In some embodiments, nuclease constructs herein can have a polynucleotide sequence at least 850% homologous to the polynucleotide encoding the polypeptide having a polynucleotide represented by SEQ ID NOs: 95-104 (ABW8 variants 1-10), 30-39 (ABW3 variants 1-10), 82-91 (ABW7 variants 1-10), 108-117 (ABW9 variants 1-10), 4-13 (ABW1 variants 1-10), 17-26 (ABW2 variants 1-10), 43-52 (ABW4 variants 1-10), 56-65 (ABW5 variants 1-10), and/or 69-78 (ABW6 variants 1-10).

[0106] In some embodiments, nuclease constructs herein having a polypeptide of at least 850% homology to the polypeptide represented SEQ ID NO: 94 (ABW8) can have increased activity and/or editing accuracy compared to other nuclease constructs. In some embodiments, nuclease constructs herein having a polypeptide of at least 85% homology to the polypeptide represented by SEQ ID NO: 94 (ABW8), 29 (ABW3), 81 (ABW7) and/or 107 (ABW9) can have increased enzymatic activity and/or editing efficiency and/or accuracy compared to other nuclease constructs such as control nuclease constructs or native sequence-containing nucleases.

[0107] In some embodiments, nuclease constructs disclosed herein having a polynucleotide encoding a polypeptide having a polynucleotide of at least 85% homology to a polynucleotide represented by SEQ ID NOs: 95-104 (ABW8 variants 1-10) can have increased enzymatic activity and/or editing efficiency and/or accuracy compared to control nuclease constructs or nuclease constructs having native sequences. In some embodiments, nuclease constructs disclosed herein having a polynucleotide encoding a polypeptide of at least 85% homology to a polynucleotide represented by SEQ ID NOs: 95-104 (ABW8 variants 1-10), 30-39 (ABW3 variants 1-10) or 82-91 (ABW7 variants 1-10) can have increased activity (e.g., editing and/or efficiency) compared to control nuclease constructs or other nuclease constructs.

[0108] As used herein, a non-naturally occurring nucleic acid sequence can be an engineered sequence or engineered nucleotide sequences of synthetized variants. Such non-naturally occurring nucleic acid sequences can be amplified, cloned, assembled, synthesized, generated from synthesized oligonucleotides or dNTPs, or otherwise obtained using methods known by those skilled in the art. In certain embodiments, examples of non-naturally occurring nucleic acid-guided nucleases disclosed herein can include those nucleic acid-guided nucleases with engineered polypeptide sequences (e.g., SEQ ID NOs: 15-17).

SEQ ID NO: 15
MGHHHHHHSSGVDLGTENLYFQSPAAKKKKLDGSVDMNNGINNFQ
NFIGISSLQKTLRNALIPTETTQQFIVKNGIIKEDELRGENRQIL
KDIMDDYYRGFISETLSSIDDIDWTSLFEKMEIQLKNGDNKDTLI
KEQTEYRKAIHKKFANDDREKNMESAKLISDILPEFVIHNNNYSA
SEKEEKTQVIKLESRFATSFKDYFKNRANCESADDISSSSCHRIV
NDNAEIFFSNALVYRRIVKSLSNDDINKISGDMKDSLKEMSLEEI
YSYEKYGEFITQEGISFYNDICGKVNSEMNLYCQKNKENKNLYKL
QKLHKQILCIADTSYEVPYKFESDEEVYQSVNGELDNISSKHIVE
RLRKIGDNYNGYNLDKIYIVSKFYESVSQKTYRDWETINTALEIH
YNNILPGNGKSKADKVKKAVKNDLQKSITEINELVSNYKLCSDDN
IKAETYIHEISHILNNFEAQELKYNPEIHLVESELKASELKNVLD
VIMNAFHWCSVEMTEELVDKDNNFYAELEEIYDEIYPVISLYNLV
RNYVTQKPYSTKKIKLNFGIPTLADGWSKSKEYSNNAIILMRDNL
YYLGIFNAKNKPDKKIIEGNTSENKGDYKKMIYNLLPGPNKMIPK
VELSSKTGVETYKPSAYILEGYKQNKHIKSSKDEDITFCHDLIDY
FKNCIAIHPEWKNFGEDESDTSTYEDISGFYREVELQGYKIDWTY
ISEKDIDLLQEKGQLYLFQIYNKDESKKSTGNDNLHTMYLKNLFS
EENLKDIVLKLNGEAEIFFRKSSIKNPIIHKKGSILVNRTYEAEE
KDQFGNIQIVRKNIPENIYQELYKYENDKSDKELSDEAAKLKNVV
GHHEAATNIVKDYRYTYDKYFLHMPITINFKANKTGFINDRILQY
IAKEKDLHVIGIDRGERNLIYVSVIDTCGNIVEQKSENIVNGYDY
QIKLKQQEGARQIARKEWKEIGKIKEIKEGYLSLVIHEISKMVIK
YNAIIAMEDLSYGFKKGREKVERQVYQKFETMLINKLNYLVFKDI
SITENGGLLKGYQLTYIPDKLKNVGHQCGCIFYVPAAYTSKIDPT
TGFVNIFKEKDLTVDAKREFIKKEDSIRYDSEKNLFCFTEDYNNF
ITQNTVMSKSSWSVYTYGVRIKRRFVNGRESNESDTIDITKDMEK
TLEMTDINWRDGHDLRQDIIDYEIVQHIFEIFRLTVQMRNSLSEL
EDRDYDRLISPVLNENNIFYDSAKAGDALPKDADANGAYCIALKG
LYEIKQITENWKEDGKFSRDKLKISNKDWEDFIQNKRYLKRPAAT
KKAGQAKKKKASGSGAGSPKKKRKVEDPKKKRKVIPG
SEQ ID NO: 16
SPAAKKKKLDGSVDMNNGINNFQNFIGISSLQKTLRNALIPTETT
QQFIVKNGIIKEDELRGENRQILKDIMDDYYRGFISETLSSIDDI
DWTSLFEKMEIQLKNGDNKDTLIKEQTEYRKAIHKKFANDDRFKN
MESAKLISDILPEFVIHNNNYSASEKEEKTQVIKLESRFATSFKD
YFKNRANCESADDISSSSCHRIVNDNAEIFFSNALVYRRIVKSLS
NDDINKISGDMKDSLKEMSLEEIYSYEKYGEFITQEGISFYNDIC
GKVNSFMNLYCQKNKENKNLYKLQKLHKQILCIADTSYEVPYKFE
SDEEVYQSVNGELDNISSKHIVERLRKIGDNYNGYNLDKIYIVSK
FYESVSQKTYRDWETINTALEIHYNNILPGNGKSKADKVKKAVKN
DLQKSITEINELVSNYKLCSDDNIKAETYIHEISHILNNFEAQEL
KYNPEIHLVESELKASELKNVLDVIMNAFHWCSVEMTEELVDKDN
NFYAELEEIYDEIYPVISLYNLVRNYVTQKPYSTKKIKLNFGIPT
LADGWSKSKEYSNNAIILMRDNLYYLGIFNAKNKPDKKIIEGNTS
ENKGDYKKMIYNLLPGPNKMIPKVELSSKTGVETYKPSAYILEGY
KQNKHIKSSKDEDITFCHDLIDYFKNCIAIHPEWKNFGFDESDTS
TYEDISGFYREVELQGYKIDWTYISEKDIDLLQEKGQLYLFQIYN
KDFSKKSTGNDNLHTMYLKNLFSEENLKDIVLKLNGEAEIFFRKS
SIKNPIIHKKGSILVNRTYEAEEKDQFGNIQIVRKNIPENIYQEL
YKYENDKSDKELSDEAAKLKNVVGHHEAATNIVKDYRYTYDKYFL
HMPITINFKANKTGFINDRILQYIAKEKDLHVIGIDRGERNLIYV
SVIDTCGNIVEQKSFNIVNGYDYQIKLKQQEGARQIARKEWKEIG
KIKEIKEGYLSLVIHEISKMVIKYNAIIAMEDLSYGFKKGRFKVE
RQVYQKFETMLINKLNYLVFKDISITENGGLLKGYQLTYIPDKLK
NVGHQCGCIFYVPAAYTSKIDPTTGFVNIFKEKDLTVDAKREFIK
KEDSIRYDSEKNLFCFTEDYNNFITQNTVMSKSSWSVYTYGVRIK
RRFVNGRESNESDTIDITKDMEKTLEMTDINWRDGHDLRQDIIDY
EIVQHIFEIFRLTVQMRNSLSELEDRDYDRLISPVLNENNIFYDS
AKAGDALPKDADANGAYCIALKGLYEIKQITENWKEDGKFSRDKL
KISNKDWEDFIQNKRYLKRPAATKKAGQAKKKKASGSGAGSPKKK
RKVEDPKKKRKVIPG
SEQ ID NO: 17
PAAKKKKLDGSVDMNNGTNNFQNFIGISSLQKTLRNALIPTETTQ
QFIVKNGIIKEDELRGENRQILKDIMDDYYRGFISETLSSIDDID
WTSLFEKMEIQLKNGDNKDTLIKEQTEYRKAIHKKFANDDRFKNM
ESAKLISDILPEFVIHNNNYSASEKEEKTQVIKLESRFATSFKDY
FKNRANCESADDISSSSCHRIVNDNAEIFFSNALVYRRIVKSLSN
DDINKISGDMKDSLKEMSLEEIYSYEKYGEFITQEGISFYNDICG
KVNSFMNLYCQKNKENKNLYKLQKLHKQILCIADTSYEVPYKFES
DEEVYQSVNGFLDNISSKHIVERLRKIGDNYNGYNLDKIYIVSKF
YESVSQKTYRDWETINTALEIHYNNILPGNGKSKADKVKKAVKND
LQKSITEINELVSNYKLCSDDNIKAETYIHEISHILNNFEAQELK
YNPEIHLVESELKASELKNVLDVIMNAFHWCSVEMTEELVDKDNN
FYAELEEIYDEIYPVISLYNLVRNYVTQKPYSTKKIKLNFGIPTL
ADGWSKSKEYSNNAIILMRDNLYYLGIFNAKNKPDKKIIEGNTSE
NKGDYKKMIYNLLPGPNKMIPKVFLSSKTGVETYKPSAYILEGYK
QNKHIKSSKDEDITECHDLIDYFKNCIAIHPEWKNFGFDESDTST
YEDISGFYREVELQGYKIDWTYISEKDIDLLQEKGQLYLFQIYNK
DFSKKSTGNDNLHTMYLKNLFSEENLKDIVLKLNGEAEIFFRKSS
IKNPIIHKKGSILVNRTYEAEEKDQFGNIQIVRKNIPENIYQELY
KYENDKSDKELSDEAAKLKNVVGHHEAATNIVKDYRYTYDKYFLH
MPITINFKANKTGFINDRILQYIAKEKDLHVIGIDRGERNLIYVS
VIDTCGNIVEQKSFNIVNGYDYQIKLKQQEGARQIARKEWKEIGK
IKEIKEGYLSLVIHEISKMVIKYNAIIAMEDLSYGFKKGREKVER
QVYQKFETMLINKLNYLVFKDISITENGGLLKGYQLTYIPDKLKN
VGHQCGCIFYVPAAYTSKIDPTTGFVNIFKFKDLTVDAKREFIKK
EDSIRYDSEKNLFCFTEDYNNFITQNTVMSKSSWSVYTYGVRIKR
RFVNGRESNESDTIDITKDMEKTLEMTDINWRDGHDLRQDIIDYE
IVQHIFEIFRLTVQMRNSLSELEDRDYDRLISPVLNENNIFYDSA
KAGDALPKDADANGAYCIALKGLYEIKQITENWKEDGKFSRDKLK
ISNKDWEDFIQNKRYLKRPAATKKAGQAKKKKASGSGAGSPKKKR
KVEDPKKKRKVIPG

[0109] More type V-A Cas proteins and their corresponding naturally occurring CRISPR-Cas systems can be identified by computational and experimental methods known in the art, e.g., as described in U.S. Pat. No. 9,790,490 and Shmakov et al. (2015) MOL. CELL, 60: 385. Exemplary computational methods include analysis of putative Cas proteins by homology modeling, structural BLAST, PSI-BLAST, or HHPred, and analysis of putative CRISPR loci by identification of CRISPR arrays. Exemplary experimental methods include in vitro cleavage assays and in-cell nuclease assays (e.g., the Surveyor assay) as described in Zetsche et al. (2015) CELL, 163: 759.

[0110] In certain embodiments, the Cas protein is a Cas nuclease that directs cleavage of one or both strands at the target locus, such as the target strand (i.e., the strand having the target nucleotide sequence that hybridizes with a single guide nucleic acid or dual guide nucleic acids) and/or the non-target strand. In certain embodiments, the Cas nuclease directs cleavage of one or both strands within at least 1, 2, 3, 4, 5, 6, 7, 8, 9, 10, 15, 20, 25, 50, 100, 200, 500, or more nucleotides from the first or last nucleotide of the target nucleotide sequence or its complementary sequence. In certain embodiments, the cleavage is staggered, i.e. generating sticky ends. In certain embodiments, the cleavage generates a staggered cut with a 5′ overhang. In certain embodiments, the cleavage generates a staggered cut with a 5′ overhang of 1 to 5 nucleotides, e.g., of 4 or 5 nucleotides. In certain embodiments, the cleavage site is distant from the PAM, e.g., the cleavage occurs after the 18th nucleotide on the non-target strand and after the 23rd nucleotide on the target strand.

[0111] In certain embodiments, the engineered, non-naturally occurring system of the present invention further comprises the Cas nuclease that a complex comprising the targeter nucleic acid and the modulator nucleic acid is capable of activating. In other embodiments, the engineered, non-naturally occurring system of the present invention further comprises a Cas protein that is related to the Cas nuclease that a complex comprising the targeter nucleic acid and the modulator nucleic acid is capable of activating. For example, in certain embodiments, the Cas protein comprises an amino acid sequence at least 80% (e.g., at least 85%, at least 90%, at least 91%, at least 92%, at least 93%, at least 94%, at least 95%, at least 96%, at least 97%, at least 98%, or at least 99%) identical to the Cas nuclease. In certain embodiments, the Cas protein comprises a nuclease-inactive mutant of the Cas nuclease. In certain embodiments, the Cas protein further comprises an effector domain.

[0112] In certain embodiments, the Cas protein lacks substantially all DNA cleavage activity. Such a Cas protein can be generated by introducing one or more mutations to an active Cas nuclease (e.g., a naturally occurring Cas nuclease). A mutated Cas protein is considered to substantially lack all DNA cleavage activity when the DNA cleavage activity of the protein has no more than 25%, 10%, 5%, 1%, 0.1%, 0.01%, or less of the DNA cleavage activity of the corresponding non-mutated form, for example, nil or negligible as compared with the non-mutated form. Thus, the Cas protein may comprise one or more mutations (e.g., a mutation in the RuvC domain of a type V-A Cas protein) and be used as a generic DNA binding protein with or without fusion to an effector domain. Exemplary mutations include D908A, E993A, and D1263A with reference to the amino acid positions in AsCpf1; D832A, E925A, and D1180A with reference to the amino acid positions in LbCpf1; and D917A, E1006A, and D1255A with reference to the amino acid position numbering of the FnCpf1. More mutations can be designed and generated according to the crystal structure described in Yamano et al. (2016) CELL, 165: 949.

[0113] It is understood that the Cas protein, rather than losing nuclease activity to cleave all DNA, may lose the ability to cleave only the target strand or only the non-target strand of a double-stranded DNA, thereby being functional as a nickase (see, Gao et al. (2016) CELL RES., 26: 901). Accordingly, in certain embodiments, the Cas nuclease is a Cas nickase. In certain embodiments, the Cas nuclease has the activity to cleave the non-target strand but substantially lacks the activity to cleave the target strand, e.g., by a mutation in the Nuc domain. In certain embodiments, the Cas nuclease has the cleavage activity to cleave the target strand but substantially lacks the activity to cleave the non-target strand.

[0114] In other embodiments, the Cas nuclease has the activity to cleave a double-stranded DNA and result in a double-strand break.

[0115] Cas proteins that lack substantially all DNA cleavage activity or have the ability to cleave only one strand may also be identified from naturally occurring systems. For example, certain naturally occurring CRISPR-Cas systems may retain the ability to bind the target nucleotide sequence but lose entire or partial DNA cleavage activity in eukaryotic (e.g., mammalian or human) cells. Such type V-A proteins are disclosed, for example, in Kim et al. (2017) ACS SYNTH. BIOL. 6(7): 1273-82 and Zhang et al. (2017) CELL DISCOV. 3:17018.

[0116] The activity of the Cas protein (e.g., Cas nuclease) can be altered, thereby creating an engineered Cas protein. In certain embodiments, the altered activity of the engineered Cas protein comprises increased targeting efficiency and/or decreased off-target binding. While not wishing to be bound by theory, it is hypothesized that off-target binding can be recognized by the Cas protein, for example, by the presence of one or more mismatches between the spacer sequence and the target nucleotide sequence, which may affect the stability and/or conformation of the CRISPR-Cas complex. In certain embodiments, the altered activity comprises modified binding, e.g., increased binding to the target locus (e.g., the target strand or the non-target strand) and/or decreased binding to off-target loci. In certain embodiments, the altered activity comprises altered charge in a region of the protein that associates with a single guide nucleic acid or dual guide nucleic acids. In certain embodiments, the altered activity of the engineered Cas protein comprises altered charge in a region of the protein that associates with the target strand and/or the non-target strand. In certain embodiments, the altered activity of the engineered Cas protein comprises altered charge in a region of the protein that associates with an off-target locus. The altered charge can include decreased positive charge, decreased negative charge, increased positive charge, and increased negative charge. For example, decreased negative charge and increased positive charge may generally strengthen the binding to the nucleic acid(s) whereas decreased positive charge and increased negative charge may weaken the binding to the nucleic acid(s). In certain embodiments, the altered activity comprises increased or decreased steric hindrance between the protein and a single guide nucleic acid or dual guide nucleic acids. In certain embodiments, the altered activity comprises increased or decreased steric hindrance between the protein and the target strand and/or the non-target strand. In certain embodiments, the altered activity comprises increased or decreased steric hindrance between the protein and an off-target locus. In certain embodiments, the modification or mutation comprises a substitution of Lys, His, Arg, Glu, Asp, Ser, Gly, or Thr. In certain embodiments, the modification or mutation comprises a substitution with Gly, Ala, Ile, Glu, or Asp. In certain embodiments, the modification or mutation comprises an amino acid substitution in the groove between the WED and RuvC domain of the Cas protein (e.g., a type V-A Cas protein).

[0117] In certain embodiments, the altered activity of the engineered Cas protein comprises increased nuclease activity to cleave the target locus. In certain embodiments, the altered activity of the engineered Cas protein comprises decreased nuclease activity to cleave an off-target locus. In certain embodiments, the altered activity of the engineered Cas protein comprises altered helicase kinetics. In certain embodiments, the engineered Cas protein comprises a modification that alters formation of the CRISPR complex.

[0118] In certain embodiments, a protospacer adjacent motif (PAM) or PAM-like motif directs binding of the Cas protein complex to the target locus. Many Cas proteins have PAM specificity. The precise sequence and length requirements for the PAM differ depending on the Cas protein used. PAM sequences are typically 2-5 base pairs in length and are adjacent to (but located on a different strand of target DNA from) the target nucleotide sequence. PAM sequences can be identified using a method known in the art, such as testing cleavage, targeting, or modification of oligonucleotides having the target nucleotide sequence and different PAM sequences.

[0119] Exemplary PAM sequences are provided in Tables 10 and 11. In one embodiment, the Cas protein is MAD7 and the PAM is TTTN, wherein N is A, C, G, or T. In another embodiment, the Cas protein is MAD7 and the PAM is CTTN, wherein N is A, C, G, or T. In another embodiment, the Cas protein is AsCpf1 and the PAM is TTTN, wherein N is A, C, G, or T. In another embodiment, the Cas protein is FnCpf1 and the PAM is 5′ TTN, wherein N is A, C, G, or T. PAM sequences for certain other type V-A Cas proteins are disclosed in Zetsche et al. (2015) CELL, 163: 759 and U.S. Pat. No. 9,982,279. Further, engineering of the PAM Interacting (PI) domain of a Cas protein may allow programing of PAM specificity, improve target site recognition fidelity, and increase the versatility of the engineered, non-naturally occurring system. Exemplary approaches to alter the PAM specificity of Cpf1 is described in Gao et al. (2017) NAT. BIOTECHNOL., 35: 789.

[0120] In certain embodiments, the engineered Cas protein comprises a modification that alters the Cas protein specificity in concert with modification to targeting range. Cas mutants can be designed to have increased target specificity as well as accommodating modifications in PAM recognition, for example by choosing mutations that alter PAM specificity (e.g., in the PI domain) and combining those mutations with groove mutations that increase (or if desired, decrease) specificity for the on-target locus versus off-target loci. The Cas modifications described herein can be used to counter loss of specificity resulting from alteration of PAM recognition, enhance gain of specificity resulting from alteration of PAM recognition, counter gain of specificity resulting from alteration of PAM recognition, or enhance loss of specificity resulting from alteration of PAM recognition.

[0121] In certain embodiments, the engineered Cas protein comprises one or more nuclear localization signal (NLS) motifs. In certain embodiments, the engineered Cas protein comprises at least 2 (e.g., at least 3, at least 4, at least 5, at least 6, at least 7, at least 8, at least 9, or at least 10) NLS motifs. Non-limiting examples of NLS motifs include: the NLS of SV40 large T-antigen, having the amino acid sequence of PKKKRKV (SEQ ID NO: 35); the NLS from nucleoplasmin, e.g., the nucleoplasmin bipartite NLS having the amino acid sequence of KRPAATKKAGQAKKKK (SEQ ID NO: 36); the c-myc NLS, having the amino acid sequence of PAAKRVKLD (SEQ ID NO: 37) or RQRRNELKRSP (SEQ ID NO: 38); the hRNPA1 M9 NLS, having the amino acid sequence of NQSSNFGPMKGGNFGGRSSGPYGGGGQYFAKPRNQGGY (SEQ ID NO: 39); the importin-α IBB domain NLS, having the amino acid sequence of RMRIZFKNKGKDTAELRRRRVEVSVELRKAKKDEQILKRRNV (SEQ ID NO: 40); the myoma T protein NLS, having the amino acid sequence of VSRKRPRP (SEQ ID NO: 41) or PPKKARED (SEQ ID NO: 42); the human p53 NLS, having the amino acid sequence of PQPKKKPL (SEQ ID NO: 43); the mouse c-abl IV NLS, having the amino acid sequence of SALIKKKKKMAP (SEQ ID NO: 44); the influenza virus NS1 NLS, having the amino acid sequence of DRLRR (SEQ ID NO: 45) or PKQKKRK (SEQ ID NO: 46); the hepatitis virus S antigen NLS, having the amino acid sequence of RKLKKKIKKL (SEQ ID NO: 47); the mouse Mx1 protein NLS, having the amino acid sequence of REKKKFLKRR (SEQ ID NO: 48); the human poly(ADP-ribose) polymerase NLS, having the amino acid sequence of KRKGDEVDGVDEVAKKKSKK (SEQ ID NO: 49); the human glucocorticoid receptor NLS, having the amino acid sequence of RKCLQAGMNLEARKTKK (SEQ ID NO: 33), and synthetic NLS motifs such as PAAKKKKLD (SEQ ID NO: 34).

[0122] In general, the one or more NLS motifs are of sufficient strength to drive accumulation of the Cas protein in a detectable amount in the nucleus of a eukaryotic cell. The strength of nuclear localization activity may derive from the number of NLS motif(s) in the Cas protein, the particular NLS motif(s) used, the position(s) of the NLS motif(s), or a combination of these factors. In certain embodiments, the engineered Cas protein comprises at least 1 (e.g., at least 2, at least 3, at least 4, at least 5, at least 6, at least 7, at least 8, at least 9, or at least 10) NLS motif(s) at or near the N-terminus (e.g., within 1, 2, 3, 4, 5, 10, 15, 20, 25, 30, 40, 50, or more amino acids along the polypeptide chain from the N-terminus). In certain embodiments, the engineered Cas protein comprises at least 1 (e.g., at least 2, at least 3, at least 4, at least 5, at least 6, at least 7, at least 8, at least 9, or at least 10) NLS motif(s) at or near the C-terminus (e.g., within 1, 2, 3, 4, 5, 10, 15, 20, 25, 30, 40, 50, or more amino acids along the polypeptide chain from the C-terminus). In certain embodiments, the engineered Cas protein comprises at least 1 (e.g., at least 2, at least 3, at least 4, at least 5, at least 6, at least 7, at least 8, at least 9, or at least 10) NLS motif(s) at or near the C-terminus and at least 1 (e.g., at least 2, at least 3, at least 4, at least 5, at least 6, at least 7, at least 8, at least 9, or at least 10) NLS motif(s) at or near the N-terminus. In certain embodiments, the engineered Cas protein comprises one, two, or three NLS motifs at or near the C-terminus. In certain embodiments, the engineered Cas protein comprises one NLS motif at or near the N-terminus and one, two, or three NLS motifs at or near the C-terminus. In certain embodiments, the engineered Cas protein comprises a nucleoplasmin NLS at or near the C-terminus.

[0123] Detection of accumulation in the nucleus may be performed by any suitable technique. For example, a detectable marker may be fused to the nucleic acid-targeting protein, such that location within a cell may be visualized. Cell nuclei may also be isolated from cells, the contents of which may then be analyzed by any suitable process for detecting the protein, such as immunohistochemistry, Western blot, or enzyme activity assay. Accumulation in the nucleus may also be determined indirectly, such as by an assay that detects the effect of the nuclear import of a Cas protein complex (e.g., assay for DNA cleavage or mutation at the target locus, or assay for altered gene expression activity) as compared to a control not exposed to the Cas protein or exposed to a Cas protein lacking one or more of the NLS motifs.

[0124] In certain embodiments, the Cas protein is a chimeric Cas protein, e.g., a Cas protein having enhanced function by being a chimera. Chimeric Cas proteins may be new Cas proteins containing fragments from more than one naturally occurring Cas proteins or variants thereof. For example, fragments of multiple type V-A Cas homologs (e.g., orthologs) may be fused to form a chimeric Cas protein. In certain embodiments, the chimeric Cas protein comprises fragments of Cpf1 orthologs from multiple species and/or strains.

[0125] In certain embodiments, the Cas protein comprises one or more effector domains. The one or more effector domains may be located at or near the N-terminus of the Cas protein and/or at or near the C-terminus of the Cas protein. In certain embodiments, an effector domain comprised in the Cas protein is a transcriptional activation domain (e.g., VP64), a transcriptional repression domain (e.g., a KRAB domain or an SID domain), an exogenous nuclease domain (e.g., FokI), a deaminase domain (e.g., cytidine deaminase or adenine deaminase), or a reverse transcriptase domain (e.g., a high fidelity reverse transcriptase domain). Other activities of effector domains include but are not limited to methylase activity, demethylase activity, transcription release factor activity, translational initiation activity, translational activation activity, translational repression activity, histone modification (e.g., acetylation or demethylation) activity, single-stranded RNA cleavage activity, double-strand RNA cleavage activity, single-strand DNA cleavage activity, double-strand DNA cleavage activity, and nucleic acid binding activity.

[0126] In certain embodiments, the Cas protein comprises one or more protein domains that enhance homology-directed repair (HDR) and/or inhibit non-homologous end joining (NHEJ). Exemplary protein domains having such functions are described in Jayavaradhan et al. (2019) NAT. COMMUN. 10(1): 2866 and Janssen et al. (2019) MOL. THER. NUCLEIC ACIDS 16: 141-54. In certain embodiments, the Cas protein comprises a dominant negative version of p53-binding protein 1 (53BP1), for example, a fragment of 53BP1 comprising a minimum focus forming region (e.g., amino acids 1231-1644 of human 53BP1). In certain embodiments, the Cas protein comprises a motif that is targeted by APC-Cdhl, such as amino acids 1-110 of human Geminin, thereby resulting in degradation of the fusion protein during the HDR non-permissive G1 phase of the cell cycle.

[0127] In certain embodiments, the Cas protein comprises an inducible or controllable domain. Non-limiting examples of inducers or controllers include light, hormones, and small molecule drugs. In certain embodiments, the Cas protein comprises a light inducible or controllable domain. In certain embodiments, the Cas protein comprises a chemically inducible or controllable domain.

[0128] In certain embodiments, the Cas protein comprises a tag protein or peptide for ease of tracking or purification. Non-limiting examples of tag proteins and peptides include fluorescent proteins (e.g., green fluorescent protein (GFP), YFP, RFP, CFP, mCherry, tdTomato), HIS tags (e.g., 6× His tag, (SEQ ID NO: 789)), hemagglutinin (HA) tag, FLAG tag, and Myc tag.

[0129] In certain embodiments, the Cas protein is conjugated to a non-protein moiety, such as a fluorophore useful for genomic imaging. In certain embodiments, the Cas protein is covalently conjugated to the non-protein moiety. The terms “CRISPR-Associated protein,” “Cas protein,” “Cas,” “CRISPR-Associated nuclease,” and “Cas nuclease” are used herein to include such conjugates despite the presence of one or more non-protein moieties.

### Guide Nucleic Acids

[0130] In certain embodiments, the guide nucleic acid of the present invention is a guide nucleic acid that is capable of binding a Cas protein alone (e.g., in the absence of a tracrRNA). Such guide nucleic acid is also called a single guide nucleic acid. In certain embodiments, the single guide nucleic acid is capable of activating a Cas nuclease alone (e.g., in the absence of a tracrRNA). The present invention also provides an engineered, non-naturally occurring system comprising the single guide nucleic acid. In certain embodiments, the system further comprises the Cas protein that the single guide nucleic acid is capable of binding or the Cas nuclease that the single guide nucleic acid is capable of activating.

[0131] In other embodiments, the guide nucleic acid of the present invention is a targeter nucleic acid that, in combination with a modulator nucleic acid, is capable of binding a Cas protein. In certain embodiments, the guide nucleic acid is a targeter nucleic acid that, in combination with a modulator nucleic acid, is capable of activating a Cas nuclease. The present invention also provides an engineered, non-naturally occurring system comprising the targeter nucleic acid and the cognate modulator nucleic acid. In certain embodiments, the system further comprises the Cas protein that the targeter nucleic acid and the modulator nucleic acid are capable of binding or the Cas nuclease that the targeter nucleic acid and the modulator nucleic acid are capable of activating.

[0132] It is contemplated that the single or dual guide nucleic acids need to be the compatible with a Cas protein (e.g., Cas nuclease) to provide an operative CRISPR system. For example, the targeter stem sequence and the modulator stem sequence can be derived from a naturally occurring crRNA capable of activating a Cas nuclease in the absence of a tracrRNA. Alternatively, the targeter stem sequence and the modulator stem sequence can be derived from a naturally occurring set of crRNA and tracrRNA, respectively, that are capable of activating a Cas nuclease. In certain embodiments, the nucleotide sequences of the targeter stem sequence and the modulator stem sequence are identical to the corresponding stem sequences of a stem-loop structure in such naturally occurring crRNA.

[0133] Guide nucleic acid sequences that are operative with a type II or type V Cas protein are known in the art and are disclosed, for example, in U.S. Pat. Nos. 9,790,490, 9,896,696, 10,113,179, and 10,266,850, and U.S. Patent Application Publication No. 2014/0242664. Exemplary single guide and dual guide sequences that are operative with certain type V-A Cas proteins are provided in Tables 10 and 11, respectively. It is understood that these sequences are merely illustrative, and other guide nucleic acid sequences may also be used with these Cas proteins.

TABLE 12
Type V-A Cas Protein and Corresponding
Single Guide Nucleic Acid Sequences

| Cas Protein | Scaffold Sequence¹ | PAM² |
|---|---|---|
| MAD7 (SEQ ID | UAAUUUCUACUCUUGUAGA (SEQ ID NO: 15), | 5′ TTTN |
| NO: 1) | AUCUACAACAGUAGA (SEQ ID NO: 16), | or 5′ |
| | AUCUACAAAAGUAGA (SEQ ID NO: 17), | |
| | GGAAUUUCUACUCUUGUAGA (SEQ ID NO: 18), | CTTN |
| | UAAUUCCCACUCUUGUGGG (SEQ ID NO: 19) | |
| MAD2 (SEQ ID | AUCUACAAGAGUAGA (SEQ ID NO: 20), | 5′ TTTN |
| NO: 2) | AUCUACAACAGUAGA (SEQ ID NO: 16), | |
| | AUCUACAAAAGUAGA (SEQ ID NO: 17), | |
| | AUCUACACUAGUAGA (SEQ ID NO: 21) | |
| AsCpf1 (SEQ | UAAUUUCUACUCUUGUAGA (SEQ ID NO: 15) | 5′ TTTN |
| ID NO: 3) | | |
| LbCpf1 (SEQ | UAAUUUCUACUAAGUGUAGA (SEQ ID NO: 22) | 5′ TTTN |
| ID NO: 4) | | |
| FnCpf1 (SEQ | UAAUUUUCUACUUGUUGUAGA (SEQ ID NO: 23) | 5′ TTN |
| ID NO: 5) | | |
| PbCpf1 (SEQ | AAUUUCUACUGUUGUAGA (SEQ ID NO: 24) | 5′ TTTC |
| ID NO: 6) | | |
| PsCpf1 (SEQ | AAUUUCUACUGUUGUAGA (SEQ ID NO: 24) | 5′ TTTC |
| ID NO: 7) | | |
| As2Cpf1 (SEQ | AAUUUCUACUGUUGUAGA (SEQ ID NO: 24) | 5′ TTTC |
| ID NO: 8) | | |
| McCpf1 (SEQ | GAAUUUCUACUGUUGUAGA (SEQ ID NO: 25) | 5′ TTTC |
| ID NO: 9) | | |
| Lb3Cpf1 (SEQ | GAAUUUCUACUGUUGUAGA (SEQ ID NO: 25) | 5′ TTTC |
| ID NO: 10) | | |
| EcCpf1 (SEQ | GAAUUUCUACUGUUGUAGA (SEQ ID NO: 25) | 5′ TTTC |
| ID NO: 11) | | |
| SmCsm1 (SEQ | GAAUUUCUACUGUUGUAGA (SEQ ID NO: 25) | 5′ TTTC |
| ID NO: 12) | | |
| SsCsm1 (SEQ | GAAUUUCUACUGUUGUAGA (SEQ ID NO: 25) | 5′ TTTC |
| ID NO: 13) | | |
| MbCsm1 (SEQ | GAAUUUCUACUGUUGUAGA (SEQ ID NO: 25) | 5′ TTTC |
| ID NO: 14) | | |

¹The modulator sequence in the scaffold sequence is underlined; the targeter stem sequence in the scaffold sequence is bold-underlined. It is understood that a “scaffold sequence” listed herein constitutes a portion of a single guide nucleic acid. Additional nucleotide sequences, other than the spacer sequence, can be comprised in the single guide nucleic acid.
²In the consensus PAM sequences, N represents A, C, G, or T. Where the PAM sequence is preceded by “5′,” it means that the PAM is located immediately upstream of the target nucleotide sequence when using the non-target strand (i.e., the strand not hybridized with the spacer sequence) as the coordinate.

TABLE 13
Type V-A Cas Protein and Corresponding Dual Guide Nucleic Acid Sequences

| | | Targeter | |
|---|---|---|---|
| | | Stem | |
| Cas Protein | Modulator Sequence¹ | Sequence | PAM² |
| MAD7 (SEQ ID NO: | UAAUUUCUAC (SEQ ID NO: | GUAGA | 5′ TTTN |
| 1) | 26) | | or 5′ |
| | AUCUAC (SEQ ID NO: 27) | GUAGA | CTTN |
| | GGAAUUUCUAC (SEQ ID NO: | GUAGA | |
| | 28) | | |
| | UAAUUCCCAC (SEQ ID NO: | GUGGG | |
| | 29) | | |
| MAD2 (SEQ ID NO: | AUCUAC (SEQ ID NO: 27) | GUAGA | 5′ TTTN |
| 2) | | | |
| AsCpf1 (SEQ ID | UAAUUUCUAC (SEQ ID NO: | GUAGA | 5′ TTTN |
| NO: 3) | 26) | | |
| LbCpf1 (SEQ ID | UAAUUUCUAC (SEQ ID NO: | GUAGA | 5′ TTTN |
| NO: 4) | 26) | | |
| FnCpf1 (SEQ ID | UAAUUUUCUACU (SEQ ID NO: | GUAGA | 5′ TTN |
| NO: 5) | 30) | | |
| PbCpf1 (SEQ ID | AAUUUCUAC (SEQ ID NO: 31) | GUAGA | 5′ TTTC |
| NO: 6) | | | |
| PsCpf1 (SEQ ID | AAUUUCUAC (SEQ ID NO: 31) | GUAGA | 5′ TTTC |
| NO: 7) | | | |
| As2Cpf1 (SEQ ID | AAUUUCUAC (SEQ ID NO: 31) | GUAGA | 5′ TTTC |
| NO: 8) | | | |
| McCpf1 (SEQ ID | GAAUUUCUAC (SEQ ID NO: | GUAGA | 5′ TTTC |
| NO: 9) | 32) | | |
| Lb3Cpf1 (SEQ ID | GAAUUUCUAC (SEQ ID NO: | GUAGA | 5′ TTTC |
| NO: 10) | 32) | | |
| EcCpf1 (SEQ ID | GAAUUUCUAC (SEQ ID NO: | GUAGA | 5′ TTTC |
| NO: 11) | 32) | | |
| SmCsm1 (SEQ ID | GAAUUUCUAC (SEQ ID NO: | GUAGA | 5′ TTTC |
| NO: 12) | 32) | | |
| SsCsm1 (SEQ ID | GAAUUUCUAC (SEQ ID NO: | GUAGA | 5′ TTTC |
| NO: 13) | 32) | | |
| MbCsm1 (SEQ ID | GAAUUUCUAC (SEQ ID NO: | GUAGA | 5′ TTTC |
| NO: 14) | 32) | | |

¹It is understood that a “modulator sequence” listed herein may constitute the nucleotide sequence of a modulator nucleic acid. Alternatively, additional nucleotide sequences can be comprised in the modulator nucleic acid 5′ and/or 3′ to a “modulator sequence” listed herein.
²In the consensus PAM sequences, N represents A, C, G, or T. Where the PAM sequence is preceded by “5′,” it means that the PAM is located immediately upstream of the target nucleotide sequence when using the non-target strand (i.e., the strand not hybridized with the spacer sequence) as the coordinate.

[0134] In certain embodiments, the guide nucleic acid of the present invention, in the context of a type V-A CRISPR-Cas system, comprises a targeter stem sequence listed in Table 13. The same targeter stem sequences, as a portion of scaffold sequences, are bold-underlined in Table 12.

[0135] In certain embodiments, the guide nucleic acid is a single guide nucleic acid that comprises, from 5′ to 3′, a modulator stem sequence, a loop sequence, a targeter stem sequence, and a spacer sequence disclosed herein. In certain embodiments, the targeter stem sequence in the single guide nucleic acid is listed in Table 12 as a bold-underlined portion of scaffold sequence, and the modulator stem sequence is complementary (e.g., 100% complementary) to the targeter stem sequence. In certain embodiments, the single guide nucleic acid comprises, from 5′ to 3′, a modulator sequence listed in Table 12 as an underlined portion of a scaffold sequence, a loop sequence, a targeter stem sequence a bold-underlined portion of the same scaffold sequence, and a spacer sequence disclosed herein. In certain embodiments, an engineered, non-naturally occurring system of the present invention comprises the single guide nucleic acid comprising a scaffold sequence listed in Table 12. In certain embodiments, the system further comprises a Cas protein (e.g., Cas nuclease) comprising an amino acid sequence at least 30%, at least 40%, at least 50%, at least 60%, at least 70%, at least 75%, at least 80%, at least 85%, at least 90%, at least 91%, at least 92%, at least 93%, at least 94%, at least 95%, at least 96%, at least 97%, at least 98%, or at least 99% identical to the amino acid sequence set forth in the SEQ ID NO listed in the same line of Table 12. In certain embodiments, the system further comprises a Cas protein (e.g., Cas nuclease) comprising the amino acid sequence set forth in the SEQ ID NO listed in the same line of Table 12. In certain embodiments, the system is useful for targeting, editing, or modifying a nucleic acid comprising a target nucleotide sequence close or adjacent to (e.g., immediately downstream of) a PAM listed in the same line of Table 12 when using the non-target strand (i.e., the strand not hybridized with the spacer sequence) as the coordinate.

[0136] In certain embodiments, the guide nucleic acid is a targeter guide nucleic acid that comprises, from 5′ to 3′, a targeter stem sequence and a spacer sequence disclosed herein. In certain embodiments, the targeter stem sequence in the targeter nucleic acid is listed in Table 13. In certain embodiments, an engineered, non-naturally occurring system of the present invention comprises the targeter nucleic acid and a modulator stem sequence complementary (e.g., 100% complementary) to the targeter stem sequence. In certain embodiments, the modulator nucleic acid comprises a modulator sequence listed in the same line of Table 13. In certain embodiments, the system further comprises a Cas protein (e.g., Cas nuclease) comprising an amino acid sequence at least 30%, at least 40%, at least 50%, at least 60%, at least 70%, at least 75%, at least 80%, at least 85%, at least 90%, at least 91%, at least 92%, at least 93%, at least 94%, at least 95%, at least 96%, at least 97%, at least 98%, or at least 99% identical to the amino acid sequence set forth in the SEQ ID NO listed in the same line of Table 13. In certain embodiments, the system further comprises a Cas protein (e.g., Cas nuclease) comprising the amino acid sequence set forth in the SEQ ID NO listed in the same line of Table 13. In certain embodiments, the system is useful for targeting, editing, or modifying a nucleic acid comprising a target nucleotide sequence close or adjacent to (e.g., immediately downstream of) a PAM listed in the same line of Table 13 when using the non-target strand (i.e., the strand not hybridized with the spacer sequence) as the coordinate.

[0137] The single guide nucleic acid, the targeter nucleic acid, and/or the modulator nucleic acid can be synthesized chemically or produced in a biological process (e.g., catalyzed by an RNA polymerase in an in vitro reaction). Such reaction or process may limit the lengths of the single guide nucleic acid, targeter nucleic acid, and modulator nucleic acid. In certain embodiments, the single guide nucleic acid is no more than 100, 90, 80, 70, 60, 50, 40, 30, or 25 nucleotides in length. In certain embodiments, the single guide nucleic acid is at least 20, 25, 30, 40, 50, 60, 70, 80, or 90 nucleotides in length. In certain embodiments, the single guide nucleic acid is 20-100, 20-90, 20-80, 20-70, 20-60, 20-50, 20-40, 20-30, 20-25, 25-100, 25-90, 25-80, 25-70, 25-60, 25-50, 25-40, 25-30, 30-100, 30-90, 30-80, 30-70, 30-60, 30-50, 30-40, 40-100, 40-90, 40-80, 40-70, 40-60, 40-50, 50-100, 50-90, 50-80, 50-70, 50-60, 60-100, 60-90, 60-80, 60-70, 70-100, 70-90, 70-80, 80-100, 80-90, or 90-100 nucleotides in length. In certain embodiments, the targeter nucleic acid is no more than 100, 90, 80, 70, 60, 50, 40, 30, or 25 nucleotides in length. In certain embodiments, the targeter nucleic acid is at least 20, 25, 30, 40, 50, 60, 70, 80, or 90 nucleotides in length. In certain embodiments, the targeter nucleic acid is 20-100, 20-90, 20-80, 20-70, 20-60, 20-50, 20-40, 20-30, 20-25, 25-100, 25-90, 25-80, 25-70, 25-60, 25-50, 25-40, 25-30, 30-100, 30-90, 30-80, 30-70, 30-60, 30-50, 30-40, 40-100, 40-90, 40-80, 40-70, 40-60, 40-50, 50-100, 50-90, 50-80, 50-70, 50-60, 60-100, 60-90, 60-80, 60-70, 70-100, 70-90, 70-80, 80-100, 80-90, or 90-100 nucleotides in length. In certain embodiments, the modulator nucleic acid is no more than 100, 90, 80, 70, 60, 50, 40, 30, or 20 nucleotides in length. In certain embodiments, the modulator nucleic acid is at least 10, 15, 20, 25, 30, 40, 50, 60, 70, 80, or 90 nucleotides in length. In certain embodiments, the modulator nucleic acid is 10-100, 10-90, 10-80, 10-70, 10-60, 10-50, 10-40, 10-30, 10-20, 15-100, 15-90, 15-80, 15-70, 15-60, 15-50, 15-40, 15-30, 15-20, 20-100, 20-90, 20-80, 20-70, 20-60, 20-50, 20-40, 20-30, 25-100, 25-90, 25-80, 25-70, 25-60, 25-50, 25-40, 25-30, 30-100, 30-90, 30-80, 30-70, 30-60, 30-50, 30-40, 40-100, 40-90, 40-80, 40-70, 40-60, 40-50, 50-100, 50-90, 50-80, 50-70, 50-60, 60-100, 60-90, 60-80, 60-70, 70-100, 70-90, 70-80, 80-100, 80-90, or 90-100 nucleotides in length.

[0138] In naturally occurring type V-A CRISPR-Cas systems, the crRNA comprises a scaffold sequence (also called direct repeat sequence) and a spacer sequence that hybridizes with the target nucleotide sequence. In certain naturally occurring type V-A CRISPR-Cas systems, the scaffold sequence forms a stem-loop structure in which the stem consists of five consecutive base pairs. A dual guide type V-A CRISPR-Cas system may be derived from a naturally occurring type V-A CRISPR-Cas system, or a variant thereof in which the Cas protein is guided to the target nucleotide sequence by a crRNA alone, such system referred to herein as a “single guide type V-A CRISPR-Cas system.” In certain modified dual guide type V-A CRISPR-Cas systems disclosed herein, the targeter nucleic acid comprises the chain of the stem sequence between the spacer and the loop (the “targeter stem sequence”) and the spacer sequence, and the modulator nucleic acid comprises the other chain of the stem sequence (the “modulator stem sequence”) and the 5′ sequence, e.g., a tail sequence, positioned 5′ to the modulator stem sequence. The targeter stem sequence is 100% complementary to the modulator stem sequence. As such, the double-stranded complex of the targeter nucleic acid and the modulator nucleic acid retains the orientation of the 5′ sequence, e.g., a tail sequence, the modulator stem sequence, the targeter stem sequence, and the spacer sequence of a single guide type V-A CRISPR-Cas system but lacks the loop structure between the modulator stem sequence and the targeter stem sequence. A schematic representation of an exemplary double-stranded complex is shown in FIG. 1.

[0139] Notwithstanding the general structural similarity, it has been discovered that the stem-loop structure of the crRNA in a naturally occurring type V-A CRISPR complex is dispensable for the functionality of the CRISPR system. This discovery is surprising because the prior art has suggested that the stem-loop structure is critical (see, Zetsche et al. (2015) Cell, 163: 759) and that removal of the loop structure by “splitting” the crRNA abrogated the activity of a AsCpf1 CRISPR system (see, Li et al. (2017) Nat. Biomed. Eng., 1: 0066).

[0140] It is contemplated that the length of the duplex formed within the single guide nucleic acid or formed between the targeter nucleic acid and the modulator nucleic acid may be a factor in providing an operative CRISPR system. In certain embodiments, the targeter stem sequence and the modulator stem sequence each consist of 4-10 nucleotides that base pair with each other. In certain embodiments, the targeter stem sequence and the modulator stem sequence each consist of 4-9, 4-8, 4-7, 4-6, 4-5, 5-10, 5-9, 5-8, 5-7, or 5-6 nucleotides that base pair with each other. In certain embodiments, the targeter stem sequence and the modulator stem sequence each consist of 4, 5, 6, 7, 8, 9, or 10 nucleotides. It is understood that the composition of the nucleotides in each sequence affects the stability of the duplex, and a C-G base pair confers greater stability than an A-U base pair. In certain embodiments, 20%-80%, 20%-70%, 20%-60%, 20%-50%, 20%-40%, 20%-30%, 30%-80%, 30%-70%, 30%-60%, 30%-50%, 30%-40%, 40%-80%, 40%-70%, 40%-60%, 40%-50%, 50%-80%, 50%-70%, 50%-60%, 60%-80%, 60%-70%, or 70%-80% of the base pairs are C-G base pairs. In certain embodiments, the targeter stem sequence and the modulator stem share at least 80%, 85%, 90%, 95%, 99%, 99.5%, or 100% sequence complementarity. In a preferred embodiment, the target stem sequence and the modulator stem sequence share at 80-100% sequence complementarity.

[0141] In certain embodiments, the targeter stem sequence and the modulator stem sequence each consist of 5 nucleotides. As such, the targeter stem sequence and the modulator stem sequence form a duplex of 5 base pairs. In certain embodiments, 0-4, 0-3, 0-2, 0-1, 1-5, 1-4, 1-3, 1-2, 2-5, 2-4, 2-3, 3-5, 3-4, or 4-5 out of the 5 base pairs are C-G base pairs. In certain embodiments, 0, 1, 2, 3, 4, or 5 out of the 5 base pairs are C-G base pairs. In certain embodiments, the targeter stem sequence consists of 5′-GUAGA-3′ and the modulator stem sequence consists of 5′-UCUAC-3′. In certain embodiments, the targeter stem sequence consists of 5′-GUGGG-3′ and the modulator stem sequence consists of 5′-CCCAC-3′.

[0142] It is also contemplated that the compatibility of the duplex for a given Cas nuclease may be a factor in providing an operative modified dual guide CRISPR system. For example, the targeter stem sequence and the modulator stem sequence can be derived from a naturally occurring crRNA capable of activating a Cas nuclease in the absence of a tracrRNA. In certain embodiments, the nucleotide sequences of the targeter stem sequence and the modulator stem sequence are identical to the corresponding stem sequences of a stem-loop structure in such naturally occurring crRNA.

[0143] In certain embodiments, in a type V-A system, the 3′ end of the targeter stem sequence is linked by no more than 1, 2, 3, 4, 5, 6, 7, 8, 9, or 10 nucleotides to the 5′ end of the spacer sequence. In certain embodiments, the targeter stem sequence and the spacer sequence are adjacent to each other, directly linked by an internucleotide bond. In certain embodiments, the targeter stem sequence and the spacer sequence are linked by one nucleotide, e.g., a uridine. In certain embodiments, the targeter stem sequence and the spacer sequence are linked by two or more nucleotides. In certain embodiments, the targeter stem sequence and the spacer sequence are linked by 1, 2, 3, 4, 5, 6, 7, 8, 9, or 10 nucleotides.

[0144] In certain embodiments, the targeter nucleic acid further comprises an additional nucleotide sequence 5′ to the targeter stem sequence. In certain embodiments, the additional nucleotide sequence comprises at least 1 (e.g., at least 2, at least 3, at least 4, at least 5, at least 6, at least 7, at least 8, at least 9, at least 10, at least 15, at least 20, at least 25, at least 30, at least 35, at least 40, at least 45, or at least 50) nucleotides. In certain embodiments, the additional nucleotide sequence consists of 1, 2, 3, 4, 5, 6, 7, 8, 9, 10, 15, 20, 25, 30, 35, 40, 45, or 50 nucleotides. In certain embodiments, the additional nucleotide sequence consists of 2 nucleotides. In certain embodiments, the additional nucleotide sequence is reminiscent to the loop or a fragment thereof (e.g., one, two, three, or four nucleotides at or near the 3′ end of the loop) in a crRNA of a corresponding single guide CRISPR-Cas system. It is understood that an additional nucleotide sequence 5′ to the targeter stem sequence is dispensable. Accordingly, in certain embodiments, the targeter nucleic acid does not comprise any additional nucleotide 5′ to the targeter stem sequence.

[0145] In certain embodiments, the targeter nucleic acid or the single guide nucleic acid further comprises an additional nucleotide sequence containing one or more nucleotides at or near the 3′ end that does not hybridize with the target nucleotide sequence. The additional nucleotide sequence may protect the targeter nucleic acid from degradation by 3′-5′ exonuclease. In certain embodiments, the additional nucleotide sequence is no more than 100 nucleotides in length. In certain embodiments, the additional nucleotide sequence is no more than 90, 80, 70, 60, 50, 40, 30, 20, or 10 nucleotides in length. In certain embodiments, the additional nucleotide sequence is at least 1, 2, 3, 4, 5, 6, 7, 8, 9, 10, 15, 20, 25, 30, 35, 40, 45, or 50 nucleotides in length. In certain embodiments, the additional nucleotide sequence is 5-100, 5-50, 5-40, 5-30, 5-25, 5-20, 5-15, 5-10, 10-100, 10-50, 10-40, 10-30, 10-25, 10-20, 10-15, 15-100, 15-50, 15-40, 15-30, 15-25, 15-20, 20-100, 20-50, 20-40, 20-30, 20-25, 25-100, 25-50, 25-40, 25-30, 30-100, 30-50, 30-40, 40-100, 40-50, or 50-100 nucleotides in length.

[0146] In certain embodiments, the additional nucleotide sequence forms a hairpin with the spacer sequence. Such secondary structure may increase the specificity of guide nucleic acid or the engineered, non-naturally occurring system (see, Kocak et al. (2019) NAT. BIOTECH. 37: 657-66). In certain embodiments, the free energy change during the hairpin formation is greater than or equal to −20 kcal/mol, −15 kcal/mol, −14 kcal/mol, −13 kcal/mol, −12 kcal/mol, −11 kcal/mol, or −10 kcal/mol. In certain embodiments, the free energy change during the hairpin formation is greater than or equal to −5 kcal/mol, −6 kcal/mol, −7 kcal/mol, −8 kcal/mol, −9 kcal/mol, −10 kcal/mol, −11 kcal/mol, −12 kcal/mol, −13 kcal/mol, −14 kcal/mol, or −15 kcal/mol. In certain embodiments, the free energy change during the hairpin formation is in the range of −20 to −10 kcal/mol, −20 to −11 kcal/mol, −20 to −12 kcal/mol, −20 to −13 kcal/mol, −20 to −14 kcal/mol, −20 to −15 kcal/mol, −15 to −10 kcal/mol, −15 to −11 kcal/mol, −15 to −12 kcal/mol, −15 to −13 kcal/mol, −15 to −14 kcal/mol, −14 to −10 kcal/mol, −14 to −11 kcal/mol, −14 to −12 kcal/mol, −14 to −13 kcal/mol, −13 to −10 kcal/mol, −13 to −11 kcal/mol, −13 to −12 kcal/mol, −12 to −10 kcal/mol, −12 to −11 kcal/mol, or −11 to −10 kcal/mol. In other embodiments, the targeter nucleic acid or the single guide nucleic acid does not comprise any nucleotide 3′ to the spacer sequence.

[0147] In certain embodiments, the modulator nucleic acid further comprises an additional nucleotide sequence 3′ to the modulator stem sequence. In certain embodiments, the additional nucleotide sequence comprises at least 1 (e.g., at least 2, at least 3, at least 4, at least 5, at least 6, at least 7, at least 8, at least 9, at least 10, at least 15, at least 20, at least 25, at least 30, at least 35, at least 40, at least 45, or at least 50) nucleotides. In certain embodiments, the additional nucleotide sequence consists of 1, 2, 3, 4, 5, 6, 7, 8, 9, 10, 15, 20, 25, 30, 35, 40, 45, or 50 nucleotides. In certain embodiments, the additional nucleotide sequence consists of 1 nucleotide (e.g., uridine). In certain embodiments, the additional nucleotide sequence consists of 2 nucleotides. In certain embodiments, the additional nucleotide sequence is reminiscent to the loop or a fragment thereof (e.g., one, two, three, or four nucleotides at or near the 5′ end of the loop) in a crRNA of a corresponding single guide CRISPR-Cas system. It is understood that an additional nucleotide sequence 3′ to the modulator stem sequence is dispensable. Accordingly, in certain embodiments, the modulator nucleic acid does not comprise any additional nucleotide 3′ to the modulator stem sequence.

[0148] It is understood that the additional nucleotide sequence 5′ to the targeter stem sequence and the additional nucleotide sequence 3′ to the modulator stem sequence, if present, may interact with each other. For example, although the nucleotide immediately 5′ to the targeter stem sequence and the nucleotide immediately 3′ to the modulator stem sequence do not form a Watson-Crick base pair (otherwise they would constitute part of the targeter stem sequence and part of the modulator stem sequence, respectively), other nucleotides in the additional nucleotide sequence 5′ to the targeter stem sequence and the additional nucleotide sequence 3′ to the modulator stem sequence may form one, two, three, or more base pairs (e.g., Watson-Crick base pairs). Such interaction may affect the stability of the complex comprising the targeter nucleic acid and the modulator nucleic acid.

[0149] The stability of a complex comprising a targeter nucleic acid and a modulator nucleic acid can be assessed by the Gibbs free energy change (ΔG) during the formation of the complex, either calculated or actually measured. Where all the predicted base pairing in the complex occurs between a base in the targeter nucleic acid and a base in the modulator nucleic acid, i.e., there is no intra-strand secondary structure, the ΔG during the formation of the complex correlates generally with the ΔG during the formation of a secondary structure within the corresponding single guide nucleic acid. Methods of calculating or measuring the ΔG are known in the art. An exemplary method is RNAfold (rna.tbi.univie.ac.at/cgi-bin/RNAWebSuite/RNAfold.cgi) as disclosed in Gruber et al. (2008) NUCLEIC ACIDS RES., 36(Web Server issue): W70-W74. Unless indicated otherwise, the ΔG values in the present disclosure are calculated by RNAfold for the formation of a secondary structure within a corresponding single guide nucleic acid. In certain embodiments, the ΔG is lower than or equal to −1 kcal/mol, e.g., lower than or equal to −2 kcal/mol, lower than or equal to −3 kcal/mol, lower than or equal to −4 kcal/mol, lower than or equal to −5 kcal/mol, lower than or equal to −6 kcal/mol, lower than or equal to −7 kcal/mol, lower than or equal to −7.5 kcal/mol, or lower than or equal to −8 kcal/mol. In certain embodiments, the ΔG is greater than or equal to −10 kcal/mol, e.g., greater than or equal to −9 kcal/mol, greater than or equal to −8.5 kcal/mol, or greater than or equal to −8 kcal/mol. In certain embodiments, the ΔG is in the range of −10 to −4 kcal/mol. In certain embodiments, the ΔG is in the range of −8 to −4 kcal/mol, −7 to −4 kcal/mol, −6 to −4 kcal/mol, −5 to −4 kcal/mol, −8 to −4.5 kcal/mol, −7 to −4.5 kcal/mol, −6 to −4.5 kcal/mol, or −5 to −4.5 kcal/mol, for example −8 kcal/mol, −7 kcal/mol, −6 kcal/mol, −5 kcal/mol, −4.9 kcal/mol, −4.8 kcal/mol, −4.7 kcal/mol, −4.6 kcal/mol, −4.5 kcal/mol, −4.4 kcal/mol, −4.3 kcal/mol, −4.2 kcal/mol, −4.1 kcal/mol, or −4 kcal/mol.

[0150] It is understood that the ΔG may be affected by a sequence in the targeter nucleic acid that is not within the targeter stem sequence, and/or a sequence in the modulator nucleic acid that is not within the modulator stem sequence. For example, one or more base pairs (e.g., Watson-Crick base pair) between an additional sequence 5′ to the targeter stem sequence and an additional sequence 3′ to the modulator stem sequence may reduce the ΔG, i.e., stabilize the nucleic acid complex. In certain embodiments, the nucleotide immediately 5′ to the targeter stem sequence comprises a uracil or is a uridine, and the nucleotide immediately 3′ to the modulator stem sequence comprises a uracil or is a uridine, thereby forming a nonconventional U-U base pair.

[0151] In certain embodiments, the modulator nucleic acid or the single guide nucleic acid comprises a nucleotide sequence referred to herein as a “5′ sequence”, e.g., a tail sequence, positioned 5′ to the modulator stem sequence. In a naturally occurring type V-A CRISPR-Cas system, the 5′ sequence, e.g., a tail sequence, is a nucleotide sequence positioned 5′ to the stem-loop structure of the crRNA. A 5′ sequence, e.g., a tail sequence, in an engineered type V-A CRISPR-Cas system, whether single guide or dual guide, can be reminiscent to the 5′ sequence, e.g., a tail sequence, in a corresponding naturally occurring type V-A CRISPR-Cas system.

[0152] Without being bound by theory, it is contemplated that the 5′ sequence, e.g., a tail sequence, may participate in the formation of the CRISPR-Cas complex. For example, in certain embodiments, the 5′ sequence, e.g., a tail sequence, forms a pseudoknot structure with the modulator stem sequence, which is recognized by the Cas protein (see, Yamano et al. (2016) CELL, 165: 949). In certain embodiments, the 5′ sequence, e.g., a tail sequence, is at least 3 (e.g., at least 4 or at least 5) nucleotides in length. In certain embodiments, the 5′ sequence, e.g., a tail sequence, is 3, 4, or 5 nucleotides in length. In certain embodiments, the nucleotide at the 3′ end of the 5′ sequence, e.g., a tail sequence, comprises a uracil or is a uridine. In certain embodiments, the second nucleotide in the 5′ sequence, e.g., a tail sequence, the position counted from the 3′ end, comprises a uracil or is a uridine. In certain embodiments, the third nucleotide in the 5′ sequence, e.g., a tail sequence, the position counted from the 3′ end, comprises an adenine or is an adenosine. This third nucleotide may form a base pair (e.g., a Watson-Crick base pair) with a nucleotide 5′ to the modulator stem sequence. Accordingly, in certain embodiments, the modulator nucleic acid comprises a uridine or a uracil-containing nucleotide 5′ to the modulator stem sequence. In certain embodiments, the 5′ sequence, e.g., a tail sequence, comprises the nucleotide sequence of 5′-AUU-3′. In certain embodiments, the 5′ sequence, e.g., a tail sequence, comprises the nucleotide sequence of 5′-AAUU-3′. In certain embodiments, the 5′ sequence, e.g., a tail sequence, comprises the nucleotide sequence of 5′-UAAUU-3′. In certain embodiments, the 5′ sequence, e.g., a tail sequence, is positioned immediately 5′ to the modulator stem sequence.

[0153] In certain embodiments, the single guide nucleic acid, the targeter nucleic acid, and/or the modulator nucleic acid are designed to reduce the degree of secondary structure other than the hybridization between the targeter stem sequence and the modulator stem sequence. In certain embodiments, no more than 75%, 50%, 40%, 30%, 25%, 20%, 15%, 10%, 5%, 1%, or fewer of the nucleotides of the single guide nucleic acid other than the targeter stem sequence and the modulator stem sequence participate in self-complementary base pairing when optimally folded. In certain embodiments, no more than 75%, 50%, 40%, 30%, 25%, 20%, 15%, 10%, 5%, 1%, or fewer of the nucleotides of the targeter nucleic acid and/or the modulator nucleic acid participate in self-complementary base pairing when optimally folded. Optimal folding may be determined by any suitable polynucleotide folding algorithm. Some programs are based on calculating the minimal Gibbs free energy. An example of one such algorithm is mFold, as described by Zuker and Stiegler (Nucleic Acids Res. 9 (1981), 133-148). Another example folding algorithm is the online webserver RNAfold, developed at Institute for Theoretical Chemistry at the University of Vienna, using the centroid structure prediction algorithm (see e.g., A. R. Gruber et al., 2008, Cell 106(1): 23-24; and P A Carr and G M Church, 2009, Nature Biotechnology 27(12): 1151-62).

[0154] The targeter nucleic acid is directed to a specific target nucleotide sequence, and a donor template can be designed to modify the target nucleotide sequence or a sequence nearby. It is understood, therefore, that association of the single guide nucleic acid, the targeter nucleic acid, or the modulator nucleic acid with a donor template can increase editing efficiency and reduce off-targeting. Accordingly, in certain embodiments, the single guide nucleic acid or the modulator nucleic acid further comprises a donor template-recruiting sequence capable of hybridizing with a donor template (see FIG. 2B). Donor templates are described in the “Donor Templates” subsection of section II infra. The donor template and donor template-recruiting sequence can be designed such that they bear sequence complementarity. In certain embodiments, the donor template-recruiting sequence is at least 90% (e.g., at least 91%, at least 92%, at least 93%, at least 94%, at least 95%, at least 96%, at least 97%, at least 98%, or at least 99%) complementary to at least a portion of the donor template. In certain embodiments, the donor template-recruiting sequence is 100% complementary to at least a portion of the donor template. In certain embodiments, where the donor template comprises an engineered sequence not homologous to the sequence to be repaired, the donor template-recruiting sequence is capable of hybridizing with the engineered sequence in the donor template. In certain embodiments, the donor template-recruiting sequence is at least 20, 25, 30, 35, 40, 45, 50, 55, 60, 65, 70, 75, 80, 85, 90, 95, or 100 nucleotides in length. In certain embodiments, the donor template-recruiting sequence is positioned at or near the 5′ end of the single guide nucleic acid or at or near the 5′ end of the modulator nucleic acid. In certain embodiments, the donor template-recruiting sequence is linked to the 5′ sequence, e.g., tail sequence, if present, or to the modulator stem sequence, of the single guide nucleic acid or the modulator nucleic acid through an internucleotide bond or a nucleotide linker.

[0155] In certain embodiments, a guide nucleic acid as described herein is associated with a donor template comprising a single strand oligodeoxynucleotide (ssODN).

[0156] In certain embodiments, the single guide nucleic acid or the modulator nucleic acid further comprises an editing enhancer sequence, which increases the efficiency of gene editing and/or homology-directed repair (HDR) (see FIG. 2C). Exemplary editing enhancer sequences are described in Park et al. (2018) NAT. COMMUN. 9: 3313. In certain embodiments, the editing enhancer sequence is positioned 5′ to the 5′ sequence, e.g., a tail sequence, if present, or 5′ to the single guide nucleic acid or the modulator stem sequence. In certain embodiments, the editing enhancer sequence is 1-50, 4-50, 9-50, 15-50, 25-50, 1-25, 4-25, 9-25, 15-25, 1-15, 4-15, 9-15, 1-9, 4-9, or 1-4 nucleotides in length. In certain embodiments, the editing enhancer sequence is at least 1, 2, 3, 4, 5, 6, 7, 8, 9, 10, 15, 20, 25, 30, 35, 40, 45, 50, or 55 nucleotides in length. The editing enhancer sequence is designed to minimize homology to the target nucleotide sequence or any other sequence that the engineered, non-naturally occurring system may be contacted to, e.g., the genome sequence of a cell into which the engineered, non-naturally occurring system is delivered. In certain embodiments, the editing enhancer is designed to minimize the presence of hairpin structure. The editing enhancer can comprise one or more of the chemical modifications disclosed herein.

[0157] The single guide nucleic acid, the modulator nucleic acid, and/or the targeter nucleic acid can further comprise a protective nucleotide sequence that prevents or reduces nucleic acid degradation. In certain embodiments, the protective nucleotide sequence is at least 5 (e.g., at least 10, at least 15, at least 20, at least 25, at least 30, at least 35, at least 40, at least 45, or at least 50) nucleotides in length. The length of the protective nucleotide sequence increases the time for an exonuclease to reach the 5′ sequence, e.g., a tail sequence, modulator stem sequence, targeter stem sequence, and/or spacer sequence, thereby protecting these portions of the single guide nucleic acid, the modulator nucleic acid, and/or the targeter nucleic acid from degradation by an exonuclease. In certain embodiments, the protective nucleotide sequence forms a secondary structure, such as a hairpin or a tRNA structure, to reduce the speed of degradation by an exonuclease (see, for example, Wu et al. (2018) CELL. MOL. LIFE SCI., 75(19): 3593-3607). Secondary structures can be predicted by methods known in the art, such as the online webserver RNAfold developed at University of Vienna using the centroid structure prediction algorithm (see, Gruber et al. (2008) NUCLEIC ACIDS RES., 36: W70). Certain chemical modifications, which may be present in the protective nucleotide sequence, can also prevent or reduce nucleic acid degradation, as disclosed in the “RNA Modifications” subsection infra.

[0158] A protective nucleotide sequence is typically located at or near the 5′ or 3′ end of the single guide nucleic acid, the modulator nucleic acid, and/or the targeter nucleic acid. In certain embodiments, the single guide nucleic acid comprises a protective nucleotide sequence at or near the 5′ end, at or near the 3′ end, or at or near both ends, optionally through a nucleotide linker. In certain embodiments, the modulator nucleic acid comprises a protective nucleotide sequence at or near the 5′ end, at or near the 3′ end, or at or near both ends, optionally through a nucleotide linker. In particular embodiments, the modulator nucleic acid comprises a protective nucleotide sequence at or near the 5′ end (see FIG. 2A). In certain embodiments, the targeter nucleic acid comprises a protective nucleotide sequence at or near the 5′ end, at or near the 3′ end, or at or near both ends, optionally through a nucleotide linker.

[0159] As described above, various nucleotide sequences can be present in the 5′ portion of a single nucleic acid or a modulator nucleic acid, including but not limited to a donor template-recruiting sequence, an editing enhancer sequence, a protective nucleotide sequence, and a linker connecting such sequence to the 5′ sequence, e.g., tail sequence, if present, or to the modulator stem sequence. It is understood that the functions of donor template recruitment, editing enhancement, protection against degradation, and linkage are not exclusive to each other, and one nucleotide sequence can have one or more of such functions. For example, in certain embodiments, the single guide nucleic acid or the modulator nucleic acid comprises a nucleotide sequence that is both a donor template-recruiting sequence and an editing enhancer sequence. In certain embodiments, the single guide nucleic acid or the modulator nucleic acid comprises a nucleotide sequence that is both a donor template-recruiting sequence and a protective sequence. In certain embodiments, the single guide nucleic acid or the modulator nucleic acid comprises a nucleotide sequence that is both an editing enhancer sequence and a protective sequence. In certain embodiments, the single guide nucleic acid or the modulator nucleic acid comprises a nucleotide sequence that is a donor template-recruiting sequence, an editing enhancer sequence, and a protective sequence. In certain embodiments, the nucleotide sequence 5′ to the 5′ sequence, e.g., a tail sequence, if present, or 5′ to the modulator stem sequence is 1-90, 1-80, 1-70, 1-60, 1-50, 1-40, 1-30, 1-20, 1-10, 10-90, 10-80, 10-70, 10-60, 10-50, 10-40, 10-30, 10-20, 20-90, 20-80, 20-70, 20-60, 20-50, 20-40, 20-30, 30-90, 30-80, 30-70, 30-60, 30-50, 30-40, 40-90, 40-80, 40-70, 40-60, 40-50, 50-90, 50-80, 50-70, 50-60, 60-90, 60-80, 60-70, 70-90, 70-80, or 80-90 nucleotides in length.

[0160] In certain embodiments, the engineered, non-naturally occurring system further comprises one or more compounds (e.g., small molecule compounds) that enhance HDR and/or inhibit NHEJ. Exemplary compounds having such functions are described in Maruyama et al. (2015) NAT BIOTECHNOL. 33(5): 538-42; Chu et al. (2015) NAT BIOTECHNOL. 33(5): 543-48; Yu et al. (2015) CELL STEM CELL 16(2): 142-47; Pinder et al. (2015) NUCLEIC ACIDS RES. 43(19): 9379-92; and Yagiz et al. (2019) COMMUN. BIOL. 2: 198. In certain embodiments, the engineered, non-naturally occurring system further comprises one or more compounds selected from the group consisting of DNA ligase IV antagonists (e.g., SCR7 compound, Ad4 ElB55K protein, and Ad4 E4orf6 protein), RAD51 agonists (e.g., RS-1), DNA-dependent protein kinase (DNA-PK) antagonists (e.g., NU7441 and KU0060648), β3-adrenergic receptor agonists (e.g., L755507), inhibitors of intracellular protein transport from the ER to the Golgi apparatus (e.g., brefeldin A), and any combinations thereof.

[0161] In certain embodiments, the engineered, non-naturally occurring system comprising a targeter nucleic acid and a modulator nucleic acid is tunable or inducible. For example, in certain embodiments, the targeter nucleic acid, the modulator nucleic acid, and/or the Cas protein can be introduced to the target nucleotide sequence at different times, the system becoming active only when all components are present. In certain embodiments, the amounts of the targeter nucleic acid, the modulator nucleic acid, and/or the Cas protein can be titrated to achieve desired efficiency and specificity. In certain embodiments, excess amount of a nucleic acid comprising the targeter stem sequence or the modulator stem sequence can be added to the system, thereby dissociating the complex of the targeter nucleic and modulator nucleic acid and turning off the system.

### B. RNA Modifications

[0162] The guide nucleic acids disclosed herein, including a single guide nucleic acid, a targeter nucleic acid, and/or a modulator nucleic acid, may comprise a DNA (e.g., modified DNA), an RNA (e.g., modified RNA), or a combination thereof. In certain embodiments, the single guide nucleic acid comprises a DNA (e.g., modified DNA), an RNA (e.g., modified RNA), or a combination thereof. In certain embodiments, the targeter nucleic acid comprises a DNA (e.g., modified DNA), an RNA (e.g., modified RNA), or a combination thereof. In certain embodiments, the modulator nucleic acid comprises a DNA (e.g., modified DNA), an RNA (e.g., modified RNA), or a combination thereof. The spacer sequences disclosed herein are presented as DNA sequences by including thymidines (T) rather than uridines (U). It is understood that corresponding RNA sequences and DNA/RNA chimeric sequences are also contemplated. For example, where the spacer sequence is an RNA, its sequence can be derived from a DNA sequence disclosed herein by replacing each T with U. As a result, for the purpose of describing a nucleotide sequence, T and U are used interchangeably herein.

[0163] In certain embodiments, the single guide nucleic acid is an RNA. A single guide nucleic acid in the form of an RNA is also called a single guide RNA. In certain embodiments, the targeter nucleic acid is an RNA and the modulator nucleic acid is an RNA. A targeter nucleic acid in the form of an RNA is also called targeter RNA, and a modulator nucleic acid in the form of an RNA is also called modulator RNA.

[0164] In certain embodiments some or all of the gNA is RNA, e.g., a gRNA. In certain embodiments, 5-100%, 10-100%, 20-100%, 30-100%, 40-100%, 50-100%, 60-100%, 70-100%, 80-100%, 90-100%, 95-100%, 99-100%, 99.5-100% of the gNA is gRNA. In certain embodiments, 20%-80%, 20%-70%, 20%-60%, 20%-50%, 20%-40%, 20%-30%, 30%-80%, 30%-70%, 30%-60%, 30%-50%, 30%-40%, 40%-80%, 40%-70%, 40%-60%, 40%-50%, 50%-80%, 50%-70%, 50%-60%, 60%-80%, 60%-70%, or 70%-80% of gNA is RNA. In certain embodiments, 50% of the gNA is RNA. In certain embodiments, 70% of the gNA is RNA. In certain embodiments, 90% of the gNA is RNA. In certain embodiments, 100% of the gNA is RNA, e.g., a gRNA.

[0165] In certain embodiments the stem sequences are 1-20, 2-19, 3-18, 4-17, 5-16, 6-15, 7-14, 8-13, 9-12, 10-11, 1-9, 2-8, 3-7, 4-6, or 2-9 nucleotides in length. In a preferred embodiment, the stem sequences are 4-6 nucleotides in length. In certain embodiments, the stem sequence of the modulator and targeter nucleic acids share 5-100%, 10-100%, 20-100%, 30-100%, 40-100%, 50-100%, 60-100%, 70-100%, 80-100%, 90-100%, 95-100%, 99-100%, 99.5-100% of the gNA is gRNA. In certain embodiments, 20%-80%, 20%-70%, 20%-60%, 20%-50%, 20%-40%, 20%-30%, 30%-80%, 30%-70%, 30%-60%, 30%-50%, 30%-40%, 40%-80%, 40%-70%, 40%-60%, 40%-50%, 50%-80%, 50%-70%, 50%-60%, 60%-80%, 60%-70%, or 70%-80% sequence complementarity. In certain embodiments, the stem sequence of the modulator and targeter nucleic acids share 80, 90, 95, or 100% sequence complementarity. In a preferred embodiment, the stem sequence of the modulator and targeter nucleic acids share 80-100% sequence complementarity.

[0166] In certain embodiments, the single guide nucleic acid, the targeter nucleic acid, and/or the modulator nucleic acid are RNAs with one or more modifications in a ribose group, one or more modifications in a phosphate group, one or more modifications in a nucleobase, one or more terminal modifications, or a combination thereof. Exemplary modifications are disclosed in U.S. Pat. Nos. 10,900,034 and 10,767,175, U.S. Patent Application Publication No. 2018/0119140, Watts et al. (2008) Drug Discov. Today 13: 842-55, and Hendel et al. (2015) NAT. BIOTECHNOL. 33: 985.

[0167] Modifications in a ribose group include but are not limited to modifications at the 2′ position or modifications at the 4′ position. For example, in certain embodiments, the ribose comprises 2′-O—C1-4alkyl, such as 2′-O-methyl (2′-OMe). In certain embodiments, the ribose comprises 2′-O—C1-3alkyl-O—C1-3alkyl, such as 2′-methoxyethoxy (2′-O—CH₂CH₂OCH₃) also known as 2′-O-(2-methoxyethyl) or 2′-MOE. In certain embodiments, the ribose comprises 2′-O-allyl. In certain embodiments, the ribose comprises 2′-O-2,4-Dinitrophenol (DNP). In certain embodiments, the ribose comprises 2′-halo, such as 2′-F, 2′-Br, 2′-Cl, or 2′-I. In certain embodiments, the ribose comprises 2′-NH₂. In certain embodiments, the ribose comprises 2′-H (e.g., a deoxynucleotide). In certain embodiments, the ribose comprises 2′-arabino or 2′-F-arabino. In certain embodiments, the ribose comprises 2′-LNA or 2′-ULNA. In certain embodiments, the ribose comprises a 4′-thioribosyl.

[0168] Modifications can also include a deoxy group, for example a 2′-deoxy-3′-phosphonoacetate (DP), a 2′-deoxy-3′-thiophosphonoacetate (DSP).

[0169] Modifications in a phosphate group include but are not limited to a phosphorothioate, a chiral phosphorothioate, a phosphorodithioate, a boranophosphonate, a C₁₋₄alkyl phosphonate such as a methylphosphonate, a boranophosphonate, a phosphonocarboxylate such as a phosphonoacetate, a phosphonocarboxylate ester such as a phosphonoacetate ester, an amide linkage, a thiophosphonocarboxylate such as a thiophosphonoacetate, a thiophosphonocarboxylate ester such as a thiophosphonoacetate ester, and a 2′,5′-linkage having a phosphodiester linker or any of the linkers above. Various salts, mixed salts and free acid forms are also included.

[0170] Modifications in a nucleobase include but are not limited to 2-thiouracil, 2-thiocytosine, 4-thiouracil, 6-thioguanine, 2-aminoadenine, 2-aminopurine, pseudouracil, hypoxanthine, 7-deazaguanine, 7-deaza-8-azaguanine, 7-deazaadenine, 7-deaza-8-azaadenine, 5-methylcytosine, 5-methyluracil, 5-hydroxymethylcytosine, 5-hydroxymethyluracil, 5,6-dehydrouracil, 5-propynylcytosine, 5-propynyluracil, 5-ethynylcytosine, 5-ethynyluracil, 5-allyluracil, 5-allylcytosine, 5-aminoallyluracil, 5-aminoallyl-cytosine, 5-bromouracil, 5-iodouracil, diaminopurine, difluorotoluene, dihydrouracil, an abasic nucleotide, Z base, P base, Unstructured Nucleic Acid, isoguanine, isocytosine (see, Piccirilli et al. (1990) NATURE, 343: 33), 5-methyl-2-pyrimidine (see, Rappaport (1993) BIOCHEMISTRY, 32: 3047), x(A,G,C,T), and y(A,G,C,T).

[0171] Terminal modifications include but are not limited to polyethyleneglycol (PEG), hydrocarbon linkers (such as heteroatom (O,S,N)-substituted hydrocarbon spacers; halo-substituted hydrocarbon spacers; keto-, carboxyl-, amido-, thionyl-, carbamoyl-, thionocarbamaoyl-containing hydrocarbon spacers), spermine linkers, dyes such as fluorescent dyes (for example, fluoresceins, rhodamines, cyanines), quenchers (for example, dabcyl, BHQ), and other labels (for example biotin, digoxigenin, acridine, streptavidin, avidin, peptides and/or proteins). In certain embodiments, a terminal modification comprises a conjugation (or ligation) of the RNA to another molecule comprising an oligonucleotide (such as deoxyribonucleotides and/or ribonucleotides), a peptide, a protein, a sugar, an oligosaccharide, a steroid, a lipid, a folic acid, a vitamin and/or other molecule. In certain embodiments, a terminal modification incorporated into the RNA is located internally in the RNA sequence via a linker such as 2-(4-butylamidofluorescein)propane-1,3-diol bis(phosphodiester) linker, which is incorporated as a phosphodiester linkage and can be incorporated anywhere between two nucleotides in the RNA.

[0172] The modifications disclosed above can be combined in the targeter nucleic acid and/or the modulator nucleic acid that are in the form of RNA. In certain embodiments, the modification in the RNA is selected from the group consisting of incorporation of 2′-O-methyl-3′phosphorothioate (MS), 2′-O-methyl-3′-phosphonoacetate (MP), 2′-O-methyl-3′-thiophosphonoacetate (MSP), 2′-halo-3′-phosphorothioate (e.g., 2′-fluoro-3′-phosphorothioate), 2′-halo-3′-phosphonoacetate (e.g., 2′-fluoro-3′-phosphonoacetate), and 2′-halo-3′-thiophosphonoacetate (e.g., 2′-fluoro-3′-thiophosphonoacetate).

[0173] In certain embodiments, modifications can include 2′-O-methyl (M), a phosphorothioate (S), a phosphonoacetate (P), a thiophosphonoacetate (SP), a 2′-O-methyl-3′-phosphorothioate (MS), a 2′-O-methyl-3′-phosphonoacetate (MP), a 2′-O-methyl-3′-thiophosphonoacetate (MSP), a 2′-deoxy-3′-phosphonoacetate (DP), a 2′-deoxy-3′-thiophosphonoacetate (DSP), or a combination thereof, at or near either the 3′ or 5′ end of either the targeter or modulator nucleic acid, as appropriate for single or dual gNA.

[0174] In certain embodiments, modifications can include either a 5′ or a 3′ propanediol or C3 linker modification.

[0175] The modifications disclosed above can be combined in the single guide RNA, the targeter RNA, and/or the modulator RNA. In certain embodiments, the modification in the RNA is selected from the group consisting of incorporation of 2′-O-methyl-3′phosphorothioate, 2′-O-methyl-3′-phosphonoacetate, 2′-O-methyl-3′-thiophosphonoacetate, 2′-halo-3′-phosphorothioate (e.g., 2′-fluoro-3′-phosphorothioate), 2′-halo-3′-phosphonoacetate (e.g., 2′-fluoro-3′-phosphonoacetate), and 2′-halo-3′-thiophosphonoacetate (e.g., 2′-fluoro-3′-thiophosphonoacetate).

[0176] In certain embodiments, the modification alters the stability of the RNA. In certain embodiments, the modification enhances the stability of the RNA, e.g., by increasing nuclease resistance of the RNA relative to a corresponding RNA without the modification. Stability-enhancing modifications include but are not limited to incorporation of 2′-O-methyl, a 2′-O—C₁₋₄alkyl, 2′-halo (e.g., 2′-F, 2′-Br, 2′-Cl, or 2′-I), 2′MOE, a 2′-O—C₁₋₃alkyl-O—C₁₋₃alkyl, 2′-NH₂, 2′-H (or 2′-deoxy), 2′-arabino, 2′-F-arabino, 4′-thioribosyl sugar moiety, 3′-phosphorothioate, 3′-phosphonoacetate, 3′-thiophosphonoacetate, 3′-methylphosphonate, 3′-boranophosphate, 3′-phosphorodithioate, locked nucleic acid (“LNA”) nucleotide which comprises a methylene bridge between the 2′ and 4′ carbons of the ribose ring, and unlocked nucleic acid (“ULNA”) nucleotide. Such modifications are suitable for use as a protecting group to prevent or reduce degradation of the 5′ sequence, e.g., a tail sequence, modulator stem sequence, targeter stem sequence, and/or spacer sequence (see, the “Guide Nucleic Acids” subsection supra).

[0177] In certain embodiments, the modification alters the specificity of the engineered, non-naturally occurring system. In certain embodiments, the modification enhances the specification of the engineered, non-naturally occurring system, e.g., by enhancing on-target binding and/or cleavage, or reducing off-target binding and/or cleavage, or a combination thereof. Specificity-enhancing modifications include but are not limited to 2-thiouracil, 2-thiocytosine, 4-thiouracil, 6-thioguanine, 2-aminoadenine, and pseudouracil.

[0178] In certain embodiments, the modification alters the immunostimulatory effect of the RNA relative to a corresponding RNA without the modification. For example, in certain embodiments, the modification reduces the ability of the RNA to activate TLR7, TLR8, TLR9, TLR3, RIG-I, and/or MDA5.

[0179] In certain embodiments, the single guide nucleic acid, the targeter nucleic acid, and/or the modulator nucleic acid comprise at least 1, 2, 3, 4, 5, 6, 7, 8, 9, 10, 11, 12, 13, 14, 15, 16, 17, 18, 19, 20, 21, 22, 23, 24, 25, 26, 27, 28, 29, 30, 31, 32, 33, 34, 35, 36, 37, 38, 39, or 40 modified nucleotides. The modification can be made at one or more positions in the single guide nucleic acid, the targeter nucleic acid, and/or the modulator nucleic acid such that these nucleic acids retain functionality. For example, the modified nucleic acids can still direct the Cas protein to the target nucleotide sequence and allow the Cas protein to exert its effector function. It is understood that the particular modification(s) at a position may be selected based on the functionality of the nucleotide at the position. For example, a specificity-enhancing modification may be suitable for one or more nucleotides or internucleotide linkages in the spacer sequence, the targeter stem sequence, or the modulator stem sequence. A stability-enhancing modification may be suitable for one or more terminal nucleotides or internucleotide linkages in the single guide nucleic acid, the targeter nucleic acid, and/or the modulator nucleic acid. In certain embodiments, at least 1 (e.g., at least 2, at least 3, at least 4, or at least 5) terminal nucleotides or internucleotide linkages at the 5′ end and/or at least 1 (e.g., at least 2, at least 3, at least 4, or at least 5) terminal nucleotides or internucleotide linkages at the 3′ end of the single guide nucleic acid are modified. In certain embodiments, 5 or fewer (e.g., 1 or fewer, 2 or fewer, 3 or fewer, or 4 or fewer) terminal nucleotides or internucleotide linkages at the 5′ end and/or 5 or fewer (e.g., 1 or fewer, 2 or fewer, 3 or fewer, or 4 or fewer) terminal nucleotides or internucleotide linkages at the 3′ end of the single guide nucleic acid are modified. In certain embodiments, at least 1 (e.g., at least 2, at least 3, at least 4, or at least 5) terminal nucleotides or internucleotide linkages at the 5′ end and/or at least 1 (e.g., at least 2, at least 3, at least 4, or at least 5) terminal nucleotides or internucleotide linkages at the 3′ end of the targeter nucleic acid are modified. In certain embodiments, 5 or fewer (e.g., 1 or fewer, 2 or fewer, 3 or fewer, or 4 or fewer) terminal nucleotides or internucleotide linkages at the 5′ end and/or 5 or fewer (e.g., 1 or fewer, 2 or fewer, 3 or fewer, or 4 or fewer) terminal nucleotides or internucleotide linkages at the 3′ end of the targeter nucleic acid are modified. In certain embodiments, at least 1 (e.g., at least 2, at least 3, at least 4, or at least 5) terminal nucleotides or internucleotide linkages at the 5′ end and/or at least 1 (e.g., at least 2, at least 3, at least 4, or at least 5) terminal nucleotides internucleotide linkages at the 3′ end of the modulator nucleic acid are modified. In certain embodiments, 5 or fewer (e.g., 1 or fewer, 2 or fewer, 3 or fewer, or 4 or fewer) terminal nucleotides at the 5′ end and/or 5 or fewer (e.g., 1 or fewer, 2 or fewer, 3 or fewer, or 4 or fewer) terminal nucleotides or internucleotide linkages at the 3′ end of the modulator nucleic acid are modified. Selection of positions for modifications is described in U.S. Pat. Nos. 10,900,034 and 10,767,175. As used in this paragraph, where the targeter or modulator nucleic acid is a combination of DNA and RNA, the nucleic acid as a whole is considered as an RNA, and the DNA nucleotide(s) are considered as modification(s) of the RNA, including a 2′-H modification of the ribose and optionally a modification of the nucleobase. Exemplary modifications are disclosed in Dang et al. (2015) Genome Biol. 16: 280, Kocaz et al. (2019) Nature Biotech. 37: 657-66, Liu et al. (2019) Nucleic Acids Res. 47(8): 4169-4180, Schubert et al. (2018) J. Cytokine Biol. 3(1): 121, Teng et al. (2019) Genome Biol. 20(1): 15, Watts et al. (2008) Drug Discov. Today 13(19-20): 842-55, and Wu et al. (2018) Cell Mol. Life. Sci. 75(19): 3593-607.

[0180] It is understood that the targeter nucleic acid and the modulator nucleic acid, while not in the same nucleic acids, i.e., not linked end-to-end through a traditional internucleotide bond, can be covalently conjugated to each other through one or more chemical modifications introduced into these nucleic acids, thereby increasing the stability of the double-stranded complex and/or improving other characteristics of the system.

### II. METHODS OF TARGETING, EDITING, AND/OR MODIFYING GENOMIC DNA

[0181] The engineered, non-naturally occurring system disclosed herein are useful for targeting, editing, and/or modifying a target nucleic acid, such as a DNA (e.g., genomic DNA) in a cell or organism. For example, in certain embodiments, with respect to a given target gene listed in Tables 1-9, an engineered, non-naturally occurring system disclosed herein that comprises a guide nucleic acid comprising a corresponding spacer sequence, when delivered into a population of human cells (e.g., Jurkat cells) ex vivo, edits the genomic sequence at the locus of the target gene in at least 5%, at least 10%, at least 15%, at least 20%, at least 25%, at least 30%, at least 35%, at least 40%, at least 45%, at least 50%, at least 55%, at least 60%, at least 65%, at least 70%, at least 75%, at least 80%, at least 85%, at least 90%, at least 95%, at least 96%, at least 97%, at least 98%, or at least 99% of the cells.

[0182] The present invention provides a method of cleaving a target nucleic acid (e.g., DNA) comprising the sequence of a preselected target gene or a portion thereof, the method comprising contacting the target DNA with an engineered, non-naturally occurring system disclosed herein, thereby resulting in cleavage of the target DNA.

[0183] In addition, the present invention provides a method of binding a target nucleic acid (e.g., DNA) comprising the sequence of a preselected target gene or a portion thereof, the method comprising contacting the target DNA with an engineered, non-naturally occurring system disclosed herein, thereby resulting in binding of the system to the target DNA. This method is useful for detecting the presence and/or location of the preselected target gene, for example, if a component of the system (e.g., the Cas protein) comprises a detectable marker.

[0184] In addition, the present invention provides a method of modifying a target nucleic acid (e.g., DNA) comprising the sequence of a preselected target gene or a portion thereof, or a structure (e.g., protein) associated with the target DNA (e.g., a histone protein in a chromosome), the method comprising contacting the target DNA with an engineered, non-naturally occurring system disclosed herein, wherein the Cas protein comprises an effector domain or is associated with an effector protein, thereby resulting in modification of the target DNA or the structure associated with the target DNA. The modification corresponds to the function of the effector domain or effector protein. Exemplary functions described in the “Cas Proteins” subsection in Section I supra are applicable hereto.

[0185] The engineered, non-naturally occurring system can be contacted with the target nucleic acid as a complex. Accordingly, in certain embodiments, the method comprises contacting the target nucleic acid with a CRISPR-Cas complex comprising a targeter nucleic acid, a modulator nucleic acid, and a Cas protein disclosed herein. In certain embodiments, the Cas protein is a type V-A, type V-C, or type V-D Cas protein (e.g., Cas nuclease). In certain embodiments, the Cas protein is a type V-A Cas protein (e.g., Cas nuclease).

[0186] The preselected target genes include human APLNR, BBS1, CALR, CD247, CD3D, CD38, CD3E, CD3G, CD40LG, CD52, CD58, COL17A1, CSF2, DEFB134, ERAP1, ERAP2, IFNGR1, IFNGR2, JAK1, JAK2, mir-101-2, MLANA, NLRC5 PSMB5, PSMB8, PSMB9, PTCD2, RFX5, RFXANK, RFXAP, RPL23, SOX10, SRP54, STAT1, Tap1, TAP2, TAPBP, TRBC1, TRBC1_2 (or TRBC1+2), TRBC2, or TWF1 genes. Accordingly, the present invention also provides a method of editing a human genomic sequence at one of these preselected target gene loci, the method comprising delivering the engineered, non-naturally occurring system disclosed herein into a human cell, thereby resulting in editing of the genomic sequence at the target gene locus in the human cell. In addition, the present invention provides a method of detecting a human genomic sequence at one of these preselected target gene loci, the method comprising delivering the engineered, non-naturally occurring system disclosed herein into a human cell, wherein a component of the system (e.g., the Cas protein) comprises a detectable marker, thereby detecting the target gene locus in the human cell. In addition, the present invention provides a method of modifying a human chromosome at one of these preselected target gene loci, the method comprising delivering the engineered, non-naturally occurring system disclosed herein into a human cell, wherein the Cas protein comprises an effector domain or is associated with an effector protein, thereby resulting in modification of the chromosome at the target gene locus in the human cell.

[0187] The CRISPR-Cas complex may be delivered to a cell by introducing a pre-formed ribonucleoprotein (RNP) complex into the cell. Alternatively, one or more components of the CRISPR-Cas complex may be expressed in the cell. Exemplary methods of delivery are known in the art and described in, for example, U.S. Pat. Nos. 10,113,167, 8,697,359, 10,570,418, 11,125,739, 10,829,787, and 11,118,194, and U.S. Patent Application Publication Nos. 2015/0344912, 2018/0119140, and 2018/0282763.

[0188] It is understood that contacting a DNA (e.g., genomic DNA) in a cell with a CRISPR-Cas complex does not require delivery of all components of the complex into the cell. For examples, one or more of the components may be pre-existing in the cell. In certain embodiments, the cell (or a parental/ancestral cell thereof) has been engineered to express the Cas protein, and the single guide nucleic acid (or a nucleic acid comprising a regulatory element operably linked to a nucleotide sequence encoding the single guide nucleic acid), the targeter nucleic acid (or a nucleic acid comprising a regulatory element operably linked to a nucleotide sequence encoding the targeter nucleic acid), and/or the modulator nucleic acid (or a nucleic acid comprising a regulatory element operably linked to a nucleotide sequence encoding the modulator nucleic acid) are delivered into the cell. In certain embodiments, the cell (or a parental/ancestral cell thereof) has been engineered to express the modulator nucleic acid, and the Cas protein (or a nucleic acid comprising a regulatory element operably linked to a nucleotide sequence encoding the Cas protein) and the targeter nucleic acid (or a nucleic acid comprising a regulatory element operably linked to a nucleotide sequence encoding the targeter nucleic acid) are delivered into the cell. In certain embodiments, the cell (or a parental/ancestral cell thereof) has been engineered to express the Cas protein and the modulator nucleic acid, and the targeter nucleic acid (or a nucleic acid comprising a regulatory element operably linked to a nucleotide sequence encoding the targeter nucleic acid) is delivered into the cell.

[0189] In certain embodiments, the target DNA is in the genome of a target cell. Accordingly, the present invention also provides a cell comprising the non-naturally occurring system or a CRISPR expression system described herein. In addition, the present invention provides a cell whose genome has been modified by the CRISPR-Cas system or complex disclosed herein.

[0190] The target cells can be mitotic or post-mitotic cells from any organism, such as a bacterial cell, an archaeal cell, a cell of a single-cell eukaryotic organism, a plant cell, an algal cell, e.g., Botryococcus braunii, Chlamydomonas reinhardtii, Nannochloropsis gaditana, Chlorella pyrenoidosa, Sargassum patens C. Agardh, and the like, a fungal cell (e.g., a yeast cell), an animal cell, a cell from an invertebrate animal (e.g., fruit fly, enidarian, echinoderm, nematode, etc.), a cell from a vertebrate animal (e.g., fish, amphibian, reptile, bird, mammal), a cell from a mammal, a cell from a rodent, or a cell from a human. The types of target cells include but are not limited to a stem cell (e.g., an embryonic stem (ES) cell, an induced pluripotent stem (iPS) cell, a germ cell), a somatic cell (e.g., a fibroblast, a hematopoietic cell, a T lymphocyte (e.g., CD8⁺ T lymphocyte), an NK cell, a neuron, a muscle cell, a bone cell, a hepatocyte, a pancreatic cell), an in vitro or in vivo embryonic cell of an embryo at any stage (e.g., a 1-cell, 2-cell, 4-cell, 8-cell; stage zebrafish embryo). Cells may be from established cell lines or may be primary cells (i.e., cells and cells cultures that have been derived from a subject and allowed to grow in vitro for a limited number of passages of the culture). For example, primary cultures are cultures that may have been passaged within 0 times, 1 time, 2 times, 4 times, 5 times, 10 times, or 15 times, but not enough times to go through the crisis stage. Typically, the primary cell lines of the present invention are maintained for fewer than 10 passages in vitro. If the cells are primary cells, they may be harvest from an individual by any suitable method. For example, leukocytes may be harvested by apheresis, leukocytapheresis, or density gradient separation, while cells from tissues such as skin, muscle, bone marrow, spleen, liver, pancreas, lung, intestine, or stomach can be harvested by biopsy. The harvested cells may be used immediately, or may be stored under frozen conditions with a cryopreservative and thawed at a later time in a manner as commonly known in the art.

### A. Ribonucleonrotein (RNP) Delivery and “Cas RNA” Delivery

[0191] The engineered, non-naturally occurring system disclosed herein can be delivered into a cell by suitable methods known in the art, including but not limited to ribonucleoprotein (RNP) delivery and “Cas RNA” delivery described below.

[0192] In certain embodiments, a CRISPR-Cas system including a single guide nucleic acid and a Cas protein, or a CRISPR-Cas system including a targeter nucleic acid, a modulator nucleic acid, and a Cas protein, can be combined into a RNP complex and then delivered into the cell as a pre-formed complex. This method is suitable for active modification of the genetic or epigenetic information in a cell during a limited time period. For example, where the Cas protein has nuclease activity to modify the genomic DNA of the cell, the nuclease activity only needs to be retained for a period of time to allow DNA cleavage, and prolonged nuclease activity may increase off-targeting. Similarly, certain epigenetic modifications can be maintained in a cell once established and can be inherited by daughter cells.

[0193] A “ribonucleoprotein” or “RNP,” as used herein, can include a complex comprising a nucleoprotein and a ribonucleic acid. A “nucleoprotein” as provided herein can include a protein capable of binding a nucleic acid (e.g., RNA, DNA). Where the nucleoprotein binds a ribonucleic acid it is referred to as “ribonucleoprotein.” The interaction between the ribonucleoprotein and the ribonucleic acid may be direct, e.g., by covalent bond, or indirect, e.g., by non-covalent bond (e.g., electrostatic interactions (e.g., ionic bond, hydrogen bond, halogen bond), van der Waals interactions (e.g., dipole-dipole, dipole-induced dipole, London dispersion), ring stacking (pi effects), hydrophobic interactions, and the like). In certain embodiments, the ribonucleoprotein includes an RNA-binding motif non-covalently bound to the ribonucleic acid. For example, positively charged aromatic amino acid residues (e.g., lysine residues) in the RNA-binding motif may form electrostatic interactions with the negative nucleic acid phosphate backbones of the RNA.

[0194] To ensure efficient loading of the Cas protein, the single guide nucleic acid, or the combination of the targeter nucleic acid and the modulator nucleic acid, can be provided in excess molar amount (e.g., at least 1 fold, at least 1.5 fold, at least 2 fold, at least 3 fold, at least 4 fold, or at least 5 fold) relative to the Cas protein. In certain embodiments, the targeter nucleic acid and the modulator nucleic acid are annealed under suitable conditions prior to complexing with the Cas protein. In other embodiments, the targeter nucleic acid, the modulator nucleic acid, and the Cas protein are directly mixed together to form an RNP.

[0195] A variety of delivery methods can be used to introduce an RNP disclosed herein into a cell. Exemplary delivery methods or vehicles include but are not limited to microinjection, liposomes (see, e.g., U.S. Pat. No. 10,829,787) such as molecular trojan horses liposomes that delivers molecules across the blood brain barrier (see, Pardridge et al. (2010) COLD SPRING HARB. PROTOC., doi:10.1101/pdb.prot5407), immunoliposomes, virosomes, microvesicles (e.g., exosomes and ARMMs), polycations, lipid:nucleic acid conjugates, electroporation, cell permeable peptides (see, U.S. Pat. No. 11,118,194), nanoparticles, nanowires (see, Shalek et al. (2012) NANO LETTERS, 12: 6498), exosomes, and perturbation of cell membrane (e.g., by passing cells through a constriction in a microfluidic system, see, U.S. Pat. No. 11,125,739). Where the target cell is a proliferating cell, the efficiency of RNP delivery can be enhanced by cell cycle synchronization (see, U.S. Pat. No. 10,570,418).

[0196] In other embodiments, the dual guide CRISPR-Cas system is delivered into a cell in a “Cas RNA” approach, i.e., delivering (a) a single guide nucleic acid, or a combination of a targeter nucleic acid and a modulator nucleic acid, and (b) an RNA (e.g., messenger RNA (mRNA)) encoding a Cas protein. The RNA encoding the Cas protein can be translated in the cell and form a complex with the single guide nucleic acid or combination of the targeter nucleic acid and the modulator nucleic acid intracellularly. Similar to the RNP approach, RNAs have limited half-lives in cells, even though stability-increasing modification(s) can be made in one or more of the RNAs. Accordingly, the “Cas RNA” approach is suitable for active modification of the genetic or epigenetic information in a cell during a limited time period, such as DNA cleavage, and has the advantage of reducing off-targeting.

[0197] The mRNA can be produced by transcription of a DNA comprising a regulatory element operably linked to a Cas coding sequence. Given that multiple copies of Cas protein can be generated from one mRNA, the targeter nucleic acid and the modulator nucleic acid are generally provided in excess molar amount (e.g., at least 5 fold, at least 10 fold, at least 20 fold, at least 30 fold, at least 50 fold, or at least 100 fold) relative to the mRNA. In certain embodiments, the targeter nucleic acid and the modulator nucleic acid are annealed under suitable conditions prior to delivery into the cells. In other embodiments, the targeter nucleic acid and the modulator nucleic acid are delivered into the cells without annealing in vitro.

[0198] A variety of delivery systems can be used to introduce an “Cas RNA” system into a cell. Non-limiting examples of delivery methods or vehicles include microinjection, biolistic particles, liposomes (see, e.g., U.S. Pat. No. 10,829,787) such as molecular trojan horses liposomes that delivers molecules across the blood brain barrier (see, Pardridge et al. (2010) COLD SPRING HARB. PROTOC., doi:10.1101/pdb.prot5407), immunoliposomes, virosomes, polycations, lipid:nucleic acid conjugates, electroporation, nanoparticles, nanowires (see, Shalek et al. (2012) NANO LETTERS, 12: 6498), exosomes, and perturbation of cell membrane (e.g., by passing cells through a constriction in a microfluidic system, see, U.S. Pat. No. 11,125,739). Specific examples of the “nucleic acid only” approach by electroporation are described in International (PCT) Publication No. WO2016/164356.

[0199] In other embodiments, the CRISPR-Cas system is delivered into a cell in the form of (a) a single guide nucleic acid or a combination of a targeter nucleic acid and a modulator nucleic acid, and (b) a DNA comprising a regulatory element operably linked to a Cas coding sequence. The DNA can be provided in a plasmid, viral vector, or any other form described in the “CRISPR Expression Systems” subsection. Such delivery method may result in constitutive expression of Cas protein in the target cell (e.g., if the DNA is maintained in the cell in an episomal vector or is integrated into the genome), and may increase the risk of off-targeting which is undesirable when the Cas protein has nuclease activity. Notwithstanding, this approach is useful when the Cas protein comprises a non-nuclease effector (e.g., a transcriptional activator or repressor). It is also useful for research purposes and for genome editing of plants.

### B. CRISPR Expression Systems

[0200] The present invention also provides a nucleic acid comprising a regulatory element operably linked to a nucleotide sequence encoding a guide nucleic acid disclosed herein. In certain embodiments, the nucleic acid comprises a regulatory element operably linked to a nucleotide sequence encoding a single guide nucleic acid disclosed herein; this nucleic acid alone can constitute a CRISPR expression system. In certain embodiments, the nucleic acid comprises a regulatory element operably linked to a nucleotide sequence encoding a targeter nucleic acid disclosed herein. In certain embodiments, the nucleic acid further comprises a nucleotide sequence encoding a modulator nucleic acid disclosed herein, wherein the nucleotide sequence encoding the modulator nucleic acid is operably linked to the same regulatory element as the nucleotide sequence encoding the targeter nucleic acid or a different regulatory element; this nucleic acid alone can constitute a CRISPR expression system.

[0201] In addition, the present invention provides a CRISPR expression system comprising: (a) a nucleic acid comprising a first regulatory element operably linked to a nucleotide sequence encoding a targeter nucleic acid disclosed herein and (b) a nucleic acid comprising a second regulatory element operably linked to a nucleotide sequence encoding a modulator nucleic acid disclosed herein.

[0202] In certain embodiments, the CRISPR expression system disclosed herein further comprises a nucleic acid comprising a third regulatory element operably linked to a nucleotide sequence encoding a Cas protein disclosed herein. In certain embodiments, the Cas protein is a type V-A, type V-C, or type V-D Cas protein (e.g., Cas nuclease). In certain embodiments, the Cas protein is a type V-A Cas protein (e.g., Cas nuclease).

[0203] As used in this context, the term “operably linked” is intended to mean that the nucleotide sequence of interest is linked to the regulatory element in a manner that allows for expression of the nucleotide sequence (e.g., in an in vitro transcription/translation system or in a host cell when the vector is introduced into the host cell).

[0204] The nucleic acids of the CRISPR expression system described above may be independently selected from various nucleic acids such as DNA (e.g., modified DNA) and RNA (e.g., modified RNA). In certain embodiments, the nucleic acids comprising a regulatory element operably linked to one or more nucleotide sequences encoding the guide nucleic acids are in the form of DNA. In certain embodiments, the nucleic acid comprising a third regulatory element operably linked to a nucleotide sequence encoding the Cas protein is in the form of DNA. The third regulatory element can be a constitutive or inducible promoter that drives the expression of the Cas protein. In other embodiments, the nucleic acid comprising a third regulatory element operably linked to a nucleotide sequence encoding the Cas protein is in the form of RNA (e.g., mRNA).

[0205] The nucleic acids of the CRISPR expression system can be provided in one or more vectors. The term “vector,” as used herein, refers to a nucleic acid molecule capable of transporting another nucleic acid to which it has been linked. Conventional viral and non-viral based gene transfer methods can be used to introduce nucleic acids in cells, such as prokaryotic cells, eukaryotic cells, mammalian cells, or target tissues. Non-viral vector delivery systems include DNA plasmids, RNA (e.g., a transcript of a vector described herein), naked nucleic acid, and nucleic acid complexed with a delivery vehicle, such as a liposome. Viral vector delivery systems include DNA and RNA viruses, which have either episomal or integrated genomes after delivery to the cell. Gene therapy procedures are known in the art and disclosed in Van Brunt (1988) BIOTECHNOLOGY, 6: 1149; Anderson (1992) SCIENCE, 256: 808; Nabel & Feigner (1993) TIBTECH, 11: 211; Mitani & Caskey (1993) TIBTECH, 11: 162; Dillon (1993) TIBTECH, 11: 167; Miller (1992) NATURE, 357: 455; Vigne, (1995) RESTORATIVE NEUROLOGY AND NEUROSCIENCE, 8: 35; Kremer & Perricaudet (1995) BRITISH MEDICAL BULLETIN, 51: 31; Haddada et al. (1995) CURRENT TOPICS IN MICROBIOLOGY AND IMMUNOLOGY, 199: 297; Yu et al. (1994) GENE THERAPY, 1: 13; and Doerfler and Bohm (Eds.) (2012) The Molecular Repertoire of Adenoviruses II: Molecular Biology of Virus-Cell Interactions. In certain embodiments, at least one of the vectors is a DNA plasmid. In certain embodiments, at least one of the vectors is a viral vector (e.g., retrovirus, adenovirus, or adeno-associated virus).

[0206] Certain vectors are capable of autonomous replication in a host cell into which they are introduced (e.g., bacterial vectors having a bacterial origin of replication and episomal mammalian vectors). Other vectors (e.g., non-episomal mammalian vectors and replication defective viral vectors) do not autonomously replicate in the host cell. Certain vectors, however, may be integrated into the genome of the host cell and thereby are replicated along with the host genome. A skilled person in the art will appreciate that different vectors may be suitable for different delivery methods and have different host tropism, and will be able to select one or more vectors suitable for the use.

[0207] The term “regulatory element,” as used herein, refers to a transcriptional and/or translational control sequence, such as a promoter, enhancer, transcription termination signal (e.g., polyadenylation signal), internal ribosomal entry sites (IRES), protein degradation signal, and the like, that provide for and/or regulate transcription of a non-coding sequence (e.g., a targeter nucleic acid or a modulator nucleic acid) or a coding sequence (e.g., a Cas protein) and/or regulate translation of an encoded polypeptide. Such regulatory elements are described, for example, in Goeddel, GENE EXPRESSION TECHNOLOGY: METHODS IN ENZYMOLOGY, 185, Academic Press, San Diego, Calif. (1990). Regulatory elements include those that direct constitutive expression of a nucleotide sequence in many types of host cell and those that direct expression of the nucleotide sequence only in certain host cells (e.g., tissue-specific regulatory sequences). A tissue-specific promoter may direct expression primarily in a desired tissue of interest, such as muscle, neuron, bone, skin, blood, specific organs (e.g., liver, pancreas), or particular cell types (e.g., lymphocytes). Regulatory elements may also direct expression in a temporal-dependent manner, such as in a cell-cycle dependent or developmental stage-dependent manner, which may or may not also be tissue or cell-type specific. In certain embodiments, a vector comprises one or more pol III promoter (e.g., 1, 2, 3, 4, 5, or more pol III promoters), one or more pol II promoters (e.g., 1, 2, 3, 4, 5, or more pol II promoters), one or more pol I promoters (e.g., 1, 2, 3, 4, 5, or more pol I promoters), or combinations thereof. Examples of pol III promoters include, but are not limited to, U6 and H1 promoters. Examples of pol II promoters include, but are not limited to, the retroviral Rous sarcoma virus (RSV) LTR promoter (optionally with the RSV enhancer), the cytomegalovirus (CMV) promoter (optionally with the CMV enhancer), the SV40 promoter, the dihydrofolate reductase promoter, the β-actin promoter, the phosphoglycerol kinase (PGK) promoter, and the EF1α promoter. Also encompassed by the term “regulatory element” are enhancer elements, such as WPRE; CMV enhancers; the R-U5′ segment in LTR of HTLV-I (see, Takebe et al. (1988) MOL. CELL. BIOL., 8: 466); SV40 enhancer; and the intron sequence between exons 2 and 3 of rabbit pi-globin (see, O'Hare et al. (1981) PROC. NATL. ACAD. SCI. USA., 78: 1527). It will be appreciated by those skilled in the art that the design of the expression vector can depend on factors such as the choice of the host cell to be transformed, the level of expression desired, etc. A vector can be introduced into host cells to produce transcripts, proteins, or peptides, including fusion proteins or peptides, encoded by nucleic acids as described herein (e.g., CRISPR transcripts, proteins, enzymes, mutant forms thereof, or fusion proteins thereof).

[0208] In certain embodiments, the nucleotide sequence encoding the Cas protein is codon optimized for expression in a eukaryotic host cell, e.g., a yeast cell, a mammalian cell (e.g., a mouse cell, a rat cell, or a human cell), or a plant cell. Various species exhibit particular bias for certain codons of a particular amino acid. Codon bias (differences in codon usage between organisms) often correlates with the efficiency of translation of messenger RNA (mRNA), which is in turn believed to be dependent on, among other things, the properties of the codons being translated and the availability of particular transfer RNA (tRNA) molecules. The predominance of selected tRNAs in a cell is generally a reflection of the codons used most frequently in peptide synthesis. Accordingly, genes can be tailored for optimal gene expression in a given organism based on codon optimization. Codon usage tables are readily available, for example, at the “Codon Usage Database” available at kazusa.or.jp/codon/and these tables can be adapted in a number of ways (see, Nakamura et al. (2000) NUCL. ACIDS RES., 28: 292). Computer algorithms for codon optimizing a particular sequence for expression in a particular host cell, such as Gene Forge (Aptagen; Jacobus, Pa.), are also available. In certain embodiments, the codon optimization facilitates or improves expression of the Cas protein in the host cell.

### C. Donor Templates

[0209] Cleavage of a target nucleotide sequence in the genome of a cell by the CRISPR-Cas system or complex disclosed herein can activate the DNA damage pathways, which may rejoin the cleaved DNA fragments by NHEJ or HDR. HDR requires a repair template, either endogenous or exogenous, to transfer the sequence information from the repair template to the target.

[0210] In certain embodiments, the engineered, non-naturally occurring system or CRISPR expression system further comprises a donor template. As used herein, the term “donor template” refers to a nucleic acid designed to serve as a repair template at or near the target nucleotide sequence upon introduction into a cell or organism. In certain embodiments, the donor template is complementary to a polynucleotide comprising the target nucleotide sequence or a portion thereof. When optimally aligned, a donor template may overlap with one or more nucleotides of a target nucleotide sequences (e.g., at least 1, 5, 10, 15, 20, 25, 30, 35, 40, 50, 100, 500 or more nucleotides). The nucleotide sequence of the donor template is typically not identical to the genomic sequence that it replaces. Rather, the donor template may contain one or more substitutions, insertions, deletions, inversions or rearrangements with respect to the genomic sequence, so long as sufficient homology is present to support homology-directed repair. In certain embodiments, the donor template comprises a non-homologous sequence flanked by two regions of homology (i.e., homology arms), such that homology-directed repair between the target DNA region and the two flanking sequences results in insertion of the non-homologous sequence at the target region. In certain embodiments, the donor template comprises a non-homologous sequence 10-100 nucleotides, 50-500 nucleotides, 100-1,000 nucleotides, 200-2,000 nucleotides, or 500-5,000 nucleotides in length positioned between two homology arms.

[0211] Generally, the homologous region(s) of a donor template has at least 50% sequence identity to a genomic sequence with which recombination is desired. The homology arms are designed or selected such that they are capable of recombining with the nucleotide sequences flanking the target nucleotide sequence under intracellular conditions. In certain embodiments, where HDR of the non-target strand is desired, the donor template comprises a first homology arm homologous to a sequence 5′ to the target nucleotide sequence and a second homology arm homologous to a sequence 3′ to the target nucleotide sequence. In certain embodiments, the first homology arm is at least 50% (e.g., at least 60%, at least 70%, at least 75%, at least 80%, at least 85%, at least 90%, at least 91%, at least 92%, at least 93%, at least 94%, at least 95%, at least 96%, at least 97%, at least 98%, at least 99%, or 100%) identical to a sequence 5′ to the target nucleotide sequence. In certain embodiments, the second homology arm is at least 50% (e.g., at least 60%, at least 70%, at least 75%, at least 80%, at least 85%, at least 90%, at least 91%, at least 92%, at least 93%, at least 94%, at least 95%, at least 96%, at least 97%, at least 98%, at least 99%, or 100%) identical to a sequence 3′ to the target nucleotide sequence. In certain embodiments, when the donor template sequence and a polynucleotide comprising a target nucleotide sequence are optimally aligned, the nearest nucleotide of the donor template is within 1, 5, 10, 15, 20, 25, 50, 75, 100, 200, 300, 400, 500, 1000, 2000, 3000, 4000, or more nucleotides from the target nucleotide sequence.

[0212] In certain embodiments, the donor template further comprises an engineered sequence not homologous to the sequence to be repaired. Such engineered sequence can harbor a barcode and/or a sequence capable of hybridizing with a donor template-recruiting sequence disclosed herein.

[0213] In certain embodiments, the donor template further comprises one or more mutations relative to the genomic sequence, wherein the one or more mutations reduce or prevent cleavage, by the same CRISPR-Cas system, of the donor template or of a modified genomic sequence with at least a portion of the donor template sequence incorporated. In certain embodiments, in the donor template, the PAM adjacent to the target nucleotide sequence and recognized by the Cas nuclease is mutated to a sequence not recognized by the same Cas nuclease. In certain embodiments, in the donor template, the target nucleotide sequence (e.g., the seed region) is mutated. In certain embodiments, the one or more mutations are silent with respect to the reading frame of a protein-coding sequence encompassing the mutated sites.

[0214] The donor template can be provided to the cell as single-stranded DNA, single-stranded RNA, double-stranded DNA, or double-stranded RNA. It is understood that the CRISPR-Cas system disclosed herein may possess nuclease activity to cleave the target strand, the non-target strand, or both. When HDR of the target strand is desired, a donor template having a nucleic acid sequence complementary to the target strand is also contemplated.

[0215] The donor template can be introduced into a cell in linear or circular form. If introduced in linear form, the ends of the donor template may be protected (e.g., from exonucleolytic degradation) by methods known to those of skill in the art. For example, one or more dideoxynucleotide residues are added to the 3′ terminus of a linear molecule and/or self-complementary oligonucleotides are ligated to one or both ends (see, for example, Chang et al. (1987) PROC. NATL. ACAD SC USA, 84: 4959; Nehls et al. (1996) SCIENCE, 272: 886; see also the chemical modifications for increasing stability and/or specificity of RNA disclosed supra). Additional methods for protecting exogenous polynucleotides from degradation include, but are not limited to, addition of terminal amino group(s) and the use of modified internucleotide linkages such as, for example, phosphorothioates, phosphoramidates, and O-methyl ribose or deoxyribose residues. As an alternative to protecting the termini of a linear donor template, additional lengths of sequence may be included outside of the regions of homology that can be degraded without impacting recombination.

[0216] A donor template can be a component of a vector as described herein, contained in a separate vector, or provided as a separate polynucleotide, such as an oligonucleotide, linear polynucleotide, or synthetic polynucleotide. In certain embodiments, the donor template is a DNA. In certain embodiments, a donor template is in the same nucleic acid as a sequence encoding the single guide nucleic acid, a sequence encoding the targeter nucleic acid, a sequence encoding the modulator nucleic acid, and/or a sequence encoding the Cas protein, where applicable. In certain embodiments, a donor template is provided in a separate nucleic acid. A donor template polynucleotide may be of any suitable length, such as 50, 75, 100, 150, 200, 500, 1000, 2000, 3000, 4000, or more nucleotides in length.

[0217] A donor template can be introduced into a cell as an isolated nucleic acid. Alternatively, a donor template can be introduced into a cell as part of a vector (e.g., a plasmid) having additional sequences such as, for example, replication origins, promoters and genes encoding antibiotic resistance, that are not intended for insertion into the DNA region of interest. Alternatively, a donor template can be delivered by viruses (e.g., adenovirus, adeno-associated virus (AAV)). In certain embodiments, the donor template is introduced as an AAV, e.g., a pseudotyped AAV. The capsid proteins of the AAV can be selected by a person skilled in the art based upon the tropism of the AAV and the target cell type. For example, in certain embodiments, the donor template is introduced into a hepatocyte as AAV8 or AAV9. In certain embodiments, the donor template is introduced into a hematopoietic stem cell, a hematopoietic progenitor cell, or a T lymphocyte (e.g., CD8⁺ T lymphocyte) as AAV6 or an AAVHSC (see, U.S. Pat. No. 9,890,396). It is understood that the sequence of a capsid protein (VP1, VP2, or VP3) may be modified from a wild-type AAV capsid protein, for example, having at least 50% (e.g., at least 60%, at least 70%, at least 75%, at least 80%, at least 85%, at least 90%, at least 91%, at least 92%, at least 93%, at least 94%, at least 95%, at least 96%, at least 97%, at least 98%, or at least 99%) sequence identity to a wild-type AAV capsid sequence.

[0218] The donor template can be delivered to a cell (e.g., a primary cell) by various delivery methods, such as a viral or non-viral method disclosed herein. In certain embodiments, a non-viral donor template is introduced into the target cell as a naked nucleic acid or in complex with a liposome or poloxamer. In certain embodiments, a non-viral donor template is introduced into the target cell by electroporation. In other embodiments, a viral donor template is introduced into the target cell by infection. The engineered, non-naturally occurring system can be delivered before, after, or simultaneously with the donor template (see, International (PCT) Application Publication No. WO2017/053729). A skilled person in the art will be able to choose proper timing based upon the form of delivery (consider, for example, the time needed for transcription and translation of RNA and protein components) and the half-life of the molecule(s) in the cell. In particular embodiments, where the CRISPR-Cas system including the Cas protein is delivered by electroporation (e.g., as an RNP), the donor template (e.g., as an AAV) is introduced into the cell within 4 hours (e.g., within 1, 2, 3, 4, 5, 6, 7, 8, 9, 10, 11, 12, 13, 14, 15, 16, 17, 18, 19, 20, 25, 30, 35, 40, 45, 50, 55, 60, 90, 120, 150, 180, 210, or 240 minutes) after the introduction of the engineered, non-naturally occurring system.

[0219] In certain embodiments, the donor template is conjugated covalently to the modulator nucleic acid. Covalent linkages suitable for this conjugation are known in the art and are described, for example, in U.S. Pat. No. 9,982,278 and Savic et al. (2018) ELIFE 7:e33761. In certain embodiments, the donor template is covalently linked to the modulator nucleic acid (e.g., the 5′ end of the modulator nucleic acid) through an internucleotide bond. In certain embodiments, the donor template is covalently linked to the modulator nucleic acid (e.g., the 5′ end of the modulator nucleic acid) through a linker.

### D. Efficiency and Specificity

[0220] The engineered, non-naturally occurring system of the present invention has the advantage of high efficiency and/or high specificity in nucleic acid targeting, cleavage, or modification.

[0221] In certain embodiments, the engineered, non-naturally occurring system has high efficiency. For example, in certain embodiments, at least 1%, at least 1.5%, at least 2%, at least 2.5%, at least 3%, at least 4%, at least 5%, at least 10%, at least 15%, at least 20%, at least 25%, at least 30%, at least 35%, at least 40%, at least 45%, at least 50%, at least 55%, at least 60%, at least 65%, at least 70%, at least 75%, at least 80%, at least 85%, at least 90%, at least 95%, at least 96%, at least 97%, at least 98%, or at least 99% of a population of nucleic acids having the target nucleotide sequence and a cognate PAM, when contacted with the engineered, non-naturally occurring system, is targeted, cleaved, or modified. In certain embodiments, the genomes of at least 5%, at least 10%, at least 15%, at least 20%, at least 25%, at least 30%, at least 35%, at least 40%, at least 45%, at least 50%, at least 55%, at least 60%, at least 65%, at least 70%, at least 75%, at least 80%, at least 85%, at least 90%, at least 95%, at least 96%, at least 97%, at least 98%, or at least 99% of a population of cells, when the engineered, non-naturally occurring system is delivered into the cells, are targeted, cleaved, or modified.

[0222] In certain embodiments, where the engineered, non-naturally occurring system comprises a guide nucleic acid comprising a spacer sequence listed in any of the Tables 1-9 or a portion thereof, the genomes of at least 10%, at least 15%, at least 20%, at least 25%, at least 30%, at least 35%, at least 40%, at least 45%, at least 50%, at least 55%, at least 60%, at least 65%, at least 70%, at least 75%, at least 80%, at least 85%, at least 90%, at least 95%, at least 96%, at least 97%, at least 98%, or at least 99% of a population of human cells are targeted, cleaved, edited, or modified when the engineered, non-naturally occurring system is delivered into the cells. In certain embodiments, where the engineered, non-naturally occurring system comprises a guide nucleic acid comprising a spacer sequence listed in any of the Tables 1-9 or a portion thereof, the genomes of at least 10%, at least 15%, at least 20%, at least 25%, at least 30%, at least 35%, at least 40%, at least 45%, at least 50%, at least 55%, at least 60%, at least 65%, at least 70%, at least 75%, at least 80%, at least 85%, at least 90%, at least 95%, at least 96%, at least 97%, at least 98%, or at least 99% of a population of human cells are edited when the engineered, non-naturally occurring system is delivered into the cells.

[0223] In certain embodiments, where the engineered, non-naturally occurring system comprises a guide nucleic acid comprising a spacer sequence listed in any one of Tables 1-9 or a portion thereof, the genomes of at least 1%, at least 1.5%, at least 2%, at least 2.5%, at least 3%, at least 4%, at least 5%, at least 10%, at least 15%, at least 20%, at least 25%, at least 30%, at least 35%, at least 40%, at least 45%, at least 50%, at least 55%, at least 60%, at least 65%, at least 70%, at least 75%, at least 80%, at least 85%, at least 90%, at least 95%, at least 96%, at least 97%, at least 98%, or at least 99% of a population of human cells are targeted, cleaved, edited, or modified when the engineered, non-naturally occurring system is delivered into the cells. In certain embodiments, where the engineered, non-naturally occurring system comprises a guide nucleic acid comprising a spacer sequence listed in any one of Tables 1-9 or a portion thereof, the genomes of at least 1%, at least 1.5%, at least 2%, at least 2.5%, at least 3%, at least 4%, at least 5%, at least 10%, at least 15%, at least 20%, at least 25%, at least 30%, at least 35%, at least 40%, at least 45%, at least 50%, at least 55%, at least 60%, at least 65%, at least 70%, at least 75%, at least 80%, at least 85%, at least 90%, at least 95%, at least 96%, at least 97%, at least 98%, or at least 99% of a population of human cells are edited when the engineered, non-naturally occurring system is delivered into the cells.

[0224] In certain embodiments, when an engineered, non-naturally occurring system comprising a guide nucleic acid comprising a spacer sequence set forth in SEQ ID NOs: 201-253 is delivered into a population of human cells ex vivo, the genome sequence at the CSF2 gene locus is edited in at least 15%, at least 20%, at least 25%, at least 30%, at least 35%, at least 40%, at least 45%, at least 50%, at least 55%, at least 60%, at least 65%, at least 70%, at least 75%, at least 80%, at least 85%, at least 90%, at least 95%, at least 96%, at least 97%, at least 98%, or at least 99% of the cells.

[0225] In certain embodiments, when an engineered, non-naturally occurring system comprising a guide nucleic acid comprising a spacer sequence set forth in SEQ ID NOs: 254-313 is delivered into a population of human cells ex vivo, the genome sequence at the CD40LG gene locus is edited in at least 30%, at least 35%, at least 40%, at least 45%, at least 50%, at least 55%, at least 60%, at least 65%, at least 70%, at least 75%, at least 80%, at least 85%, at least 90%, at least 95%, at least 96%, at least 97%, at least 98%, or at least 99% of the cells.

[0226] In certain embodiments, when an engineered, non-naturally occurring system comprising a guide nucleic acid comprising a spacer sequence set forth in SEQ ID NOs: 314-319 and 329-332 is delivered into a population of human cells ex vivo, the genome sequence at the TRBC1gene locus is edited in at least 25%, at least 30%, at least 35%, at least 40%, at least 45%, at least 50%, at least 55%, at least 60%, at least 65%, at least 70%, at least 75%, at least 80%, at least 85%, at least 90%, at least 95%, at least 96%, at least 97%, at least 98%, or at least 99% of the cells.

[0227] In certain embodiments, when an engineered, non-naturally occurring system comprising a guide nucleic acid comprising a spacer sequence set forth in SEQ ID NOs: 320-328 and 329-332 is delivered into a population of human cells ex vivo, the genome sequence at the TRBC2 gene locus is edited in at least 10%, at least 15%, at least 20%, at least 25%, at least 30%, at least 35%, at least 40%, at least 45%, at least 50%, at least 55%, at least 60%, at least 65%, at least 70%, at least 75%, at least 80%, at least 85%, at least 90%, at least 95%, at least 96%, at least 97%, at least 98%, or at least 99% of the cells.

[0228] In certain embodiments, when an engineered, non-naturally occurring system comprising a guide nucleic acid comprising a spacer sequence set forth in SEQ ID NOs: 329-332 is delivered into a population of human cells ex vivo, the genome sequence at both the human TRBC1 gene and the human TRBC2 gene (TRBC1_2) locus is edited in at least 30%, at least 35%, at least 40%, at least 45%, at least 50%, at least 55%, at least 60%, at least 65%, at least 70%, at least 75%, at least 80%, at least 85%, at least 90%, at least 95%, at least 96%, at least 97%, at least 98%, or at least 99% of the cells.

[0229] In certain embodiments, when an engineered, non-naturally occurring system comprising a guide nucleic acid comprising a spacer sequence set forth in SEQ ID NOs: 333-374 is delivered into a population of human cells ex vivo, the genome sequence at the CD3E gene locus is edited in at least 30%, at least 35%, at least 40%, at least 45%, at least 50%, at least 55%, at least 60%, at least 65%, at least 70%, at least 75%, at least 80%, at least 85%, at least 90%, at least 95%, at least 96%, at least 97%, at least 98%, or at least 99% of the cells.

[0230] In certain embodiments, when an engineered, non-naturally occurring system comprising a guide nucleic acid comprising a spacer sequence set forth in SEQ ID NOs: 375-411 is delivered into a population of human cells ex vivo, the genome sequence at the CD38 gene locus is edited in at least 1%, at least 1.5%, at least 5%, at least 10%, at least 20%, at least 25%, at least 30%, at least 35%, at least 40%, at least 45%, at least 50%, at least 55%, at least 60%, at least 65%, at least 70%, at least 75%, at least 80%, at least 85%, at least 90%, at least 95%, at least 96%, at least 97%, at least 98%, or at least 99% of the cells.

[0231] In certain embodiments, when an engineered, non-naturally occurring system comprising a guide nucleic acid comprising a spacer sequence set forth in SEQ ID NOs: 412-421 is delivered into a population of human cells ex vivo, the genome sequence at the APLNR gene locus is edited in at least 1%, at least 1.5%, at least 5%, at least 10%, at least 20%, at least 25%, at least 30%, at least 35%, at least 40%, at least 45%, at least 50%, at least 55%, at least 60%, at least 65%, at least 70%, at least 75%, at least 80%, at least 85%, at least 90%, at least 95%, at least 96%, at least 97%, at least 98%, or at least 99% of the cells.

[0232] In certain embodiments, when an engineered, non-naturally occurring system comprising a guide nucleic acid comprising a spacer sequence set forth in SEQ ID NOs: 422-431 is delivered into a population of human cells ex vivo, the genome sequence at the BBS1 gene locus is edited in at least 1%, at least 1.5%, at least 5%, at least 10%, at least 20%, at least 25%, at least 30%, at least 35%, at least 40%, at least 45%, at least 50%, at least 55%, at least 60%, at least 65%, at least 70%, at least 75%, at least 80%, at least 85%, at least 90%, at least 95%, at least 96%, at least 97%, at least 98%, or at least 99% of the cells.

[0233] In certain embodiments, when an engineered, non-naturally occurring system comprising a guide nucleic acid comprising a spacer sequence set forth in SEQ ID NOs: 432-441 is delivered into a population of human cells ex vivo, the genome sequence at the CALR gene locus is edited in at least 1%, at least 1.5%, at least 5%, at least 10%, at least 20%, at least 25%, at least 30%, at least 35%, at least 40%, at least 45%, at least 50%, at least 55%, at least 60%, at least 65%, at least 70%, at least 75%, at least 80%, at least 85%, at least 90%, at least 95%, at least 96%, at least 97%, at least 98%, or at least 99% of the cells.

[0234] In certain embodiments, when an engineered, non-naturally occurring system comprising a guide nucleic acid comprising a spacer sequence set forth in SEQ ID NOs: 442-451 is delivered into a population of human cells ex vivo, the genome sequence at the CD247 gene locus is edited in at least 1%, at least 1.5%, at least 5%, at least 10%, at least 20%, at least 25%, at least 30%, at least 35%, at least 40%, at least 45%, at least 50%, at least 55%, at least 60%, at least 65%, at least 70%, at least 75%, at least 80%, at least 85%, at least 90%, at least 95%, at least 96%, at least 97%, at least 98%, or at least 99% of the cells.

[0235] In certain embodiments, when an engineered, non-naturally occurring system comprising a guide nucleic acid comprising a spacer sequence set forth in SEQ ID NOs: 452-461 is delivered into a population of human cells ex vivo, the genome sequence at the CD3G gene locus is edited in at least 1%, at least 1.5%, at least 5%, at least 10%, at least 20%, at least 25%, at least 30%, at least 35%, at least 40%, at least 45%, at least 50%, at least 55%, at least 60%, at least 65%, at least 70%, at least 75%, at least 80%, at least 85%, at least 90%, at least 95%, at least 96%, at least 97%, at least 98%, or at least 99% of the cells.

[0236] In certain embodiments, when an engineered, non-naturally occurring system comprising a guide nucleic acid comprising a spacer sequence set forth in SEQ ID NOs: 462-465 is delivered into a population of human cells ex vivo, the genome sequence at the CD52 gene locus is edited in at least 1%, at least 1.5%, at least 5%, at least 10%, at least 20%, at least 25%, at least 30%, at least 35%, at least 40%, at least 45%, at least 50%, at least 55%, at least 60%, at least 65%, at least 70%, at least 75%, at least 80%, at least 85%, at least 90%, at least 95%, at least 96%, at least 97%, at least 98%, or at least 99% of the cells.

[0237] In certain embodiments, when an engineered, non-naturally occurring system comprising a guide nucleic acid comprising a spacer sequence set forth in SEQ ID NOs: 466-475 is delivered into a population of human cells ex vivo, the genome sequence at the CD58 gene locus is edited in at least 1%, at least 1.5%, at least 5%, at least 10%, at least 20%, at least 25%, at least 30%, at least 35%, at least 40%, at least 45%, at least 50%, at least 55%, at least 60%, at least 65%, at least 70%, at least 75%, at least 80%, at least 85%, at least 90%, at least 95%, at least 96%, at least 97%, at least 98%, or at least 99% of the cells.

[0238] In certain embodiments, when an engineered, non-naturally occurring system comprising a guide nucleic acid comprising a spacer sequence set forth in SEQ ID NOs: 476-485 is delivered into a population of human cells ex vivo, the genome sequence at the COL17A1 gene locus is edited in at least 1%, at least 1.5%, at least 5%, at least 10%, at least 20%, at least 25%, at least 30%, at least 35%, at least 40%, at least 45%, at least 50%, at least 55%, at least 60%, at least 65%, at least 70%, at least 75%, at least 80%, at least 85%, at least 90%, at least 95%, at least 96%, at least 97%, at least 98%, or at least 99% of the cells.

[0239] In certain embodiments, when an engineered, non-naturally occurring system comprising a guide nucleic acid comprising a spacer sequence set forth in SEQ ID NOs: 486-495 is delivered into a population of human cells ex vivo, the genome sequence at the DEFB134 gene locus is edited in at least 1%, at least 1.5%, at least 5%, at least 10%, at least 20%, at least 25%, at least 30%, at least 35%, at least 40%, at least 45%, at least 50%, at least 55%, at least 60%, at least 65%, at least 70%, at least 75%, at least 80%, at least 85%, at least 90%, at least 95%, at least 96%, at least 97%, at least 98%, or at least 99% of the cells.

[0240] In certain embodiments, when an engineered, non-naturally occurring system comprising a guide nucleic acid comprising a spacer sequence set forth in SEQ ID NOs: 496-505 is delivered into a population of human cells ex vivo, the genome sequence at the ERAP1 gene locus is edited in at least 1%, at least 1.5%, at least 5%, at least 10%, at least 20%, at least 25%, at least 30%, at least 35%, at least 40%, at least 45%, at least 50%, at least 55%, at least 60%, at least 65%, at least 70%, at least 75%, at least 80%, at least 85%, at least 90%, at least 95%, at least 96%, at least 97%, at least 98%, or at least 99% of the cells.

[0241] In certain embodiments, when an engineered, non-naturally occurring system comprising a guide nucleic acid comprising a spacer sequence set forth in SEQ ID NOs: 506-515 is delivered into a population of human cells ex vivo, the genome sequence at the ERAP2 gene locus is edited in at least 1%, at least 1.5%, at least 5%, at least 10%, at least 20%, at least 25%, at least 30%, at least 35%, at least 40%, at least 45%, at least 50%, at least 55%, at least 60%, at least 65%, at least 70%, at least 75%, at least 80%, at least 85%, at least 90%, at least 95%, at least 96%, at least 97%, at least 98%, or at least 99% of the cells.

[0242] In certain embodiments, when an engineered, non-naturally occurring system comprising a guide nucleic acid comprising a spacer sequence set forth in SEQ ID NOs: 516-525 is delivered into a population of human cells ex vivo, the genome sequence at the IFNGR1 gene locus is edited in at least 1%, at least 1.5%, at least 5%, at least 10%, at least 20%, at least 25%, at least 30%, at least 35%, at least 40%, at least 45%, at least 50%, at least 55%, at least 60%, at least 65%, at least 70%, at least 75%, at least 80%, at least 85%, at least 90%, at least 95%, at least 96%, at least 97%, at least 98%, or at least 99% of the cells.

[0243] In certain embodiments, when an engineered, non-naturally occurring system comprising a guide nucleic acid comprising a spacer sequence set forth in SEQ ID NOs: 526-535 is delivered into a population of human cells ex vivo, the genome sequence at the IFNGR2 gene locus is edited in at least 1%, at least 1.5%, at least 5%, at least 10%, at least 20%, at least 25%, at least 30%, at least 35%, at least 40%, at least 45%, at least 50%, at least 55%, at least 60%, at least 65%, at least 70%, at least 75%, at least 80%, at least 85%, at least 90%, at least 95%, at least 96%, at least 97%, at least 98%, or at least 99% of the cells.

[0244] In certain embodiments, when an engineered, non-naturally occurring system comprising a guide nucleic acid comprising a spacer sequence set forth in SEQ ID NOs: 536-545 is delivered into a population of human cells ex vivo, the genome sequence at the JAK1 gene locus is edited in at least 1%, at least 1.5%, at least 5%, at least 10%, at least 20%, at least 25%, at least 30%, at least 35%, at least 40%, at least 45%, at least 50%, at least 55%, at least 60%, at least 65%, at least 70%, at least 75%, at least 80%, at least 85%, at least 90%, at least 95%, at least 96%, at least 97%, at least 98%, or at least 99% of the cells.

[0245] In certain embodiments, when an engineered, non-naturally occurring system comprising a guide nucleic acid comprising a spacer sequence set forth in SEQ ID NOs: 546-555 is delivered into a population of human cells ex vivo, the genome sequence at the JAK2 gene locus is edited in at least 1%, at least 1.5%, at least 5%, at least 10%, at least 20%, at least 25%, at least 30%, at least 35%, at least 40%, at least 45%, at least 50%, at least 55%, at least 60%, at least 65%, at least 70%, at least 75%, at least 80%, at least 85%, at least 90%, at least 95%, at least 96%, at least 97%, at least 98%, or at least 99% of the cells.

[0246] In certain embodiments, when an engineered, non-naturally occurring system comprising a guide nucleic acid comprising a spacer sequence set forth in SEQ ID NOs: 556-558 is delivered into a population of human cells ex vivo, the genome sequence at the mir-101-2 gene locus is edited in at least 1%, at least 1.5%, at least 5%, at least 10%, at least 20%, at least 25%, at least 30%, at least 35%, at least 40%, at least 45%, at least 50%, at least 55%, at least 60%, at least 65%, at least 70%, at least 75%, at least 80%, at least 85%, at least 90%, at least 95%, at least 96%, at least 97%, at least 98%, or at least 99% of the cells.

[0247] In certain embodiments, when an engineered, non-naturally occurring system comprising a guide nucleic acid comprising a spacer sequence set forth in SEQ ID NOs: 559-568 is delivered into a population of human cells ex vivo, the genome sequence at the MLANA gene locus is edited in at least 1%, at least 1.5%, at least 5%, at least 10%, at least 20%, at least 25%, at least 30%, at least 35%, at least 40%, at least 45%, at least 50%, at least 55%, at least 60%, at least 65%, at least 70%, at least 75%, at least 80%, at least 85%, at least 90%, at least 95%, at least 96%, at least 97%, at least 98%, or at least 99% of the cells.

[0248] In certain embodiments, when an engineered, non-naturally occurring system comprising a guide nucleic acid comprising a spacer sequence set forth in SEQ ID NOs: 569-578 is delivered into a population of human cells ex vivo, the genome sequence at the PSMB5 gene locus is edited in at least 1%, at least 1.5%, at least 5%, at least 10%, at least 20%, at least 25%, at least 30%, at least 35%, at least 40%, at least 45%, at least 50%, at least 55%, at least 60%, at least 65%, at least 70%, at least 75%, at least 80%, at least 85%, at least 90%, at least 95%, at least 96%, at least 97%, at least 98%, or at least 99% of the cells.

[0249] In certain embodiments, when an engineered, non-naturally occurring system comprising a guide nucleic acid comprising a spacer sequence set forth in SEQ ID NOs: 579-588 is delivered into a population of human cells ex vivo, the genome sequence at the PSMB8 gene locus is edited in at least 1%, at least 1.5%, at least 5%, at least 10%, at least 20%, at least 25%, at least 30%, at least 35%, at least 40%, at least 45%, at least 50%, at least 55%, at least 60%, at least 65%, at least 70%, at least 75%, at least 80%, at least 85%, at least 90%, at least 95%, at least 96%, at least 97%, at least 98%, or at least 99% of the cells.

[0250] In certain embodiments, when an engineered, non-naturally occurring system comprising a guide nucleic acid comprising a spacer sequence set forth in SEQ ID NOs: 589-598 is delivered into a population of human cells ex vivo, the genome sequence at the PSMB9 gene locus is edited in at least 1%, at least 1.5%, at least 5%, at least 10%, at least 20%, at least 25%, at least 30%, at least 35%, at least 40%, at least 45%, at least 50%, at least 55%, at least 60%, at least 65%, at least 70%, at least 75%, at least 80%, at least 85%, at least 90%, at least 95%, at least 96%, at least 97%, at least 98%, or at least 99% of the cells.

[0251] In certain embodiments, when an engineered, non-naturally occurring system comprising a guide nucleic acid comprising a spacer sequence set forth in SEQ ID NOs: 599-608 is delivered into a population of human cells ex vivo, the genome sequence at the PTCD2 gene locus is edited in at least 1%, at least 1.5%, at least 5%, at least 10%, at least 20%, at least 25%, at least 30%, at least 35%, at least 40%, at least 45%, at least 50%, at least 55%, at least 60%, at least 65%, at least 70%, at least 75%, at least 80%, at least 85%, at least 90%, at least 95%, at least 96%, at least 97%, at least 98%, or at least 99% of the cells.

[0252] In certain embodiments, when an engineered, non-naturally occurring system comprising a guide nucleic acid comprising a spacer sequence set forth in SEQ ID NOs: 609-618 is delivered into a population of human cells ex vivo, the genome sequence at the RFX5 gene locus is edited in at least 1%, at least 1.5%, at least 5%, at least 10%, at least 20%, at least 25%, at least 30%, at least 35%, at least 40%, at least 45%, at least 50%, at least 55%, at least 60%, at least 65%, at least 70%, at least 75%, at least 80%, at least 85%, at least 90%, at least 95%, at least 96%, at least 97%, at least 98%, or at least 99% of the cells.

[0253] In certain embodiments, when an engineered, non-naturally occurring system comprising a guide nucleic acid comprising a spacer sequence set forth in SEQ ID NOs: 619-628 is delivered into a population of human cells ex vivo, the genome sequence at the RFXANK gene locus is edited in at least 1%, at least 1.5%, at least 5%, at least 10%, at least 20%, at least 25%, at least 30%, at least 35%, at least 40%, at least 45%, at least 50%, at least 55%, at least 60%, at least 65%, at least 70%, at least 75%, at least 80%, at least 85%, at least 90%, at least 95%, at least 96%, at least 97%, at least 98%, or at least 99% of the cells.

[0254] In certain embodiments, when an engineered, non-naturally occurring system comprising a guide nucleic acid comprising a spacer sequence set forth in SEQ ID NOs: 629-638 is delivered into a population of human cells ex vivo, the genome sequence at the RFXAP gene locus is edited in at least 1%, at least 1.5%, at least 5%, at least 10%, at least 20%, at least 25%, at least 30%, at least 35%, at least 40%, at least 45%, at least 50%, at least 55%, at least 60%, at least 65%, at least 70%, at least 75%, at least 80%, at least 85%, at least 90%, at least 95%, at least 96%, at least 97%, at least 98%, or at least 99% of the cells.

[0255] In certain embodiments, when an engineered, non-naturally occurring system comprising a guide nucleic acid comprising a spacer sequence set forth in SEQ ID NOs: 639-648 is delivered into a population of human cells ex vivo, the genome sequence at the RPL23 gene locus is edited in at least 1%, at least 1.5%, at least 5%, at least 10%, at least 20%, at least 25%, at least 30%, at least 35%, at least 40%, at least 45%, at least 50%, at least 55%, at least 60%, at least 65%, at least 70%, at least 75%, at least 80%, at least 85%, at least 90%, at least 95%, at least 96%, at least 97%, at least 98%, or at least 99% of the cells.

[0256] In certain embodiments, when an engineered, non-naturally occurring system comprising a guide nucleic acid comprising a spacer sequence set forth in SEQ ID NOs: 649-654 is delivered into a population of human cells ex vivo, the genome sequence at the SOX10 gene locus is edited in at least 1%, at least 1.5%, at least 5%, at least 10%, at least 20%, at least 25%, at least 30%, at least 35%, at least 40%, at least 45%, at least 50%, at least 55%, at least 60%, at least 65%, at least 70%, at least 75%, at least 80%, at least 85%, at least 90%, at least 95%, at least 96%, at least 97%, at least 98%, or at least 99% of the cells.

[0257] In certain embodiments, when an engineered, non-naturally occurring system comprising a guide nucleic acid comprising a spacer sequence set forth in SEQ ID NOs: 655-665 is delivered into a population of human cells ex vivo, the genome sequence at the SRP54 gene locus is edited in at least 1%, at least 1.5%, at least 5%, at least 10%, at least 20%, at least 25%, at least 30%, at least 35%, at least 40%, at least 45%, at least 50%, at least 55%, at least 60%, at least 65%, at least 70%, at least 75%, at least 80%, at least 85%, at least 90%, at least 95%, at least 96%, at least 97%, at least 98%, or at least 99% of the cells.

[0258] In certain embodiments, when an engineered, non-naturally occurring system comprising a guide nucleic acid comprising a spacer sequence set forth in SEQ ID NOs: 666-675 is delivered into a population of human cells ex vivo, the genome sequence at the STAT1 gene locus is edited in at least 1%, at least 1.5%, at least 5%, at least 10%, at least 20%, at least 25%, at least 30%, at least 35%, at least 40%, at least 45%, at least 50%, at least 55%, at least 60%, at least 65%, at least 70%, at least 75%, at least 80%, at least 85%, at least 90%, at least 95%, at least 96%, at least 97%, at least 98%, or at least 99% of the cells.

[0259] In certain embodiments, when an engineered, non-naturally occurring system comprising a guide nucleic acid comprising a spacer sequence set forth in SEQ ID NOs: 676-685 is delivered into a population of human cells ex vivo, the genome sequence at the Tap1 gene locus is edited in at least 1%, at least 1.5%, at least 5%, at least 10%, at least 20%, at least 25%, at least 30%, at least 35%, at least 40%, at least 45%, at least 50%, at least 55%, at least 60%, at least 65%, at least 70%, at least 75%, at least 80%, at least 85%, at least 90%, at least 95%, at least 96%, at least 97%, at least 98%, or at least 99% of the cells.

[0260] In certain embodiments, when an engineered, non-naturally occurring system comprising a guide nucleic acid comprising a spacer sequence set forth in SEQ ID NOs: 686-695 is delivered into a population of human cells ex vivo, the genome sequence at the TAP2 gene locus is edited in at least 1%, at least 1.5%, at least 5%, at least 10%, at least 20%, at least 25%, at least 30%, at least 35%, at least 40%, at least 45%, at least 50%, at least 55%, at least 60%, at least 65%, at least 70%, at least 75%, at least 80%, at least 85%, at least 90%, at least 95%, at least 96%, at least 97%, at least 98%, or at least 99% of the cells.

[0261] In certain embodiments, when an engineered, non-naturally occurring system comprising a guide nucleic acid comprising a spacer sequence set forth in SEQ ID NOs: 696-705 is delivered into a population of human cells ex vivo, the genome sequence at the TAPBP gene locus is edited in at least 1%, at least 1.5%, at least 5%, at least 10%, at least 20%, at least 25%, at least 30%, at least 35%, at least 40%, at least 45%, at least 50%, at least 55%, at least 60%, at least 65%, at least 70%, at least 75%, at least 80%, at least 85%, at least 90%, at least 95%, at least 96%, at least 97%, at least 98%, or at least 99% of the cells.

[0262] In certain embodiments, when an engineered, non-naturally occurring system comprising a guide nucleic acid comprising a spacer sequence set forth in SEQ ID NOs: 706-715 is delivered into a population of human cells ex vivo, the genome sequence at the TWF1 gene locus is edited in at least 1%, at least 1.5%, at least 5%, at least 10%, at least 20%, at least 25%, at least 30%, at least 35%, at least 40%, at least 45%, at least 50%, at least 55%, at least 60%, at least 65%, at least 70%, at least 75%, at least 80%, at least 85%, at least 90%, at least 95%, at least 96%, at least 97%, at least 98%, or at least 99% of the cells.

[0263] In certain embodiments, when an engineered, non-naturally occurring system comprising a guide nucleic acid comprising a spacer sequence set forth in SEQ ID NOs: 716-725 is delivered into a population of human cells ex vivo, the genome sequence at the CD3D gene locus is edited in at least 1%, at least 1.5%, at least 5%, at least 10%, at least 20%, at least 25%, at least 30%, at least 35%, at least 40%, at least 45%, at least 50%, at least 55%, at least 60%, at least 65%, at least 70%, at least 75%, at least 80%, at least 85%, at least 90%, at least 95%, at least 96%, at least 97%, at least 98%, or at least 99% of the cells.

[0264] In certain embodiments, when an engineered, non-naturally occurring system comprising a guide nucleic acid comprising a spacer sequence set forth in SEQ ID NOs: 726-744 is delivered into a population of human cells ex vivo, the genome sequence at the NLRC5 gene locus is edited in at least 1%, at least 1.5%, at least 5%, at least 10%, at least 20%, at least 25%, at least 30%, at least 35%, at least 40%, at least 45%, at least 50%, at least 55%, at least 60%, at least 65%, at least 70%, at least 75%, at least 80%, at least 85%, at least 90%, at least 95%, at least 96%, at least 97%, at least 98%, or at least 99% of the cells.

[0265] In certain embodiments, the genome edit is an insertion or a deletion, ie., an INDEL.

[0266] In certain embodiments, when an engineered, non-naturally occurring system comprising a guide nucleic acid comprising a spacer sequence of any one of Tables 1-9 is delivered into a one or more cells ex vivo, the edited cell demonstrates less than 80% (e.g., less than 70%, less than 60%, less than 50%, less than 40%, less than 30%, less than 20%, less than 10%, or less than 5%) of the expression of the endogenous gene relative to a corresponding unmodified or parental cell.

[0267] It has been observed that for a given spacer sequence, the occurrence of on-target events and the occurrence of off-target events are generally correlated. For certain therapeutic purposes, lower on-target efficiency can be tolerated and low off-target frequency is more desirable. For example, when editing or modifying a proliferating cell that will be delivered to a subject and proliferate in vivo, tolerance to off-target events is low. Prior to delivery, it is possible to assess the on-target and off-target events, thereby selecting one or more colonies that have the desired edit or modification and lack any undesired edit or modification. Notwithstanding, the on-target efficiency needs to meet a certain standard to be suitable for therapeutic use. The high editing efficiency observed with the spacer sequences disclosed herein in a standard CRISPR-Cas system allows tuning of the system, for example, by reducing the binding of the guide nucleic acids to the Cas protein, without losing therapeutic applicability.

[0268] In certain embodiments, when a population of nucleic acids having the target nucleotide sequence and a cognate PAM is contacted with the engineered, non-naturally occurring system disclosed herein, the frequency of off-target events (e.g., targeting, cleavage, or modification, depending on the function of the CRISPR-Cas system) is reduced. Methods of assessing off-target events were summarized in Lazzarotto et al. (2018) NAT PROTOC. 13(11): 2615-42, and include discovery of in situ Cas off-targets and verification by sequencing (DISCOVER-seq) as disclosed in Wienert et al. (2019) SCIENCE 364(6437): 286-89; genome-wide unbiased identification of double-stranded breaks (DSBs) enabled by sequencing (GUIDE-seq) as disclosed in Kleinstiver et al. (2016) NAT. BIOTECH. 34: 869-74; circularization for in vitro reporting of cleavage effects by sequencing (CIRCLE-seq) as described in Kocak et al. (2019) NAT. BIOTECH. 37: 657-66. In certain embodiments, the off-target events include targeting, cleavage, or modification at a given off-target locus (e.g., the locus with the highest occurrence of off-target events detected). In certain embodiments, the off-target events include targeting, cleavage, or modification at all the loci with detectable off-target events, collectively.

[0269] In certain embodiments, genomic mutations are detected in no more than 0.0001%, 0.0002%, 0.0003%, 0.0004%, 0.0005%, 0.0006%, 0.0007%, 0.0008%, 0.0009%, 0.001%, 0.002%, 0.003%, 0.004%, 0.005%, 0.006%, 0.007%, 0.008%, 0.009%, 0.01%, 0.02%, 0.03%, 0.04%, 0.05%, 0.06%, 0.07%, 0.08%, 0.09%, 0.1%, 0.2%, 0.3%, 0.4%, 0.5%, 0.6%, 0.7%, 0.8%, 0.9%, 1%, 2%, 3%, 4%, or 5% of the cells at any off-target loci (in aggregate). In certain embodiments, the ratio of the percentage of cells having an on-target event to the percentage of cells having any off-target event (e.g., the ratio of the percentage of cells having an on-target editing event to the percentage of cells having a mutation at any off-target loci) is at least 10, 20, 30, 40, 50, 60, 70, 80, 90, 100, 200, 300, 400, 500, 600, 700, 800, 900, 1000, 2000, 3000, 4000, 5000, 6000, 7000, 8000, 9000, or 10000. It is understood that genetic variation may be present in a population of cells, for example, by spontaneous mutations, and such mutations are not included as off-target events.

### E. Multiplex Methods

[0270] The method of targeting, editing, and/or modifying a genomic DNA disclosed herein can be conducted in multiplicity. For example, a library of targeter nucleic acids can be used to target multiple genomic loci; a library of donor templates can also be used to generate multiple insertions, deletions, and/or substitutions. The multiplex assay can be conducted in a screening method wherein each separate cell culture (e.g., in a well of a 96-well plate or a 384-well plate) is exposed to a different guide nucleic acid having a different targeter stem sequence and/or a different donor template. The multiplex assay can also be conducted in a selection method wherein a cell culture is exposed to a mixed population of different guide nucleic acids and/or donor templates, and the cells with desired characteristics (e.g., functionality) are enriched or selected by advantageous survival or growth, resistance to a certain agent, expression of a detectable protein (e.g., a fluorescent protein that is detectable by flow cytometry), etc.

[0271] In certain embodiments, the plurality of guide nucleic acids and/or the plurality of donor templates are designed for saturation editing. For example, in certain embodiments, each nucleotide position in a sequence of interest is systematically modified with each of all four traditional bases, A, T, G and C. In other embodiments, at least one sequence in each gene from a pool of genes of interest is modified, for example, according to a CRISPR design algorithm. In certain embodiments, each sequence from a pool of exogenous elements of interest (e.g., protein coding sequences, non-protein coding genes, regulatory elements) is inserted into one or more given loci of the genome.

[0272] It is understood that the multiplex methods suitable for the purpose of carrying out a screening or selection method, which is typically conducted for research purposes, may be different from the methods suitable for therapeutic purposes. For example, constitutive expression of certain elements (e.g., a Cas nuclease and/or a guide nucleic acid) may be undesirable for therapeutic purposes due to the potential of increased off-targeting. Conversely, for research purposes, constitutive expression of a Cas nuclease and/or a guide nucleic acid may be desirable. For example, the constitutive expression provides a large window during which other elements can be introduced. When a stable cell line is established for the constitutive expression, the number of exogenous elements that need to be co-delivered into a single cell is also reduced. Therefore, constitutive expression of certain elements can increase the efficiency and reduce the complexity of a screening or selection process. Inducible expression of certain elements of the system disclosed herein may also be used for research purposes given similar advantages. Expression may be induced by an exogenous agent (e.g., a small molecule) or by an endogenous molecule or complex present in a particular cell type (e.g., at a particular stage of differentiation). Methods known in the art, such as those described in the “CRISPR Expression Systems” subsection supra, can be used for constitutively or inducibly expressing one or more elements.

[0273] It is further understood that despite the need to introduce multiple elements—the single guide nucleic acid and the Cas protein; or the targeter nucleic acid, the modulator nucleic acid, and the Cas protein—these elements can be delivered into the cell as a single complex of pre-formed RNP. Therefore, the efficiency of the screening or selection process can also be achieved by pre-assembling a plurality of RNP complexes in a multiplex manner.

[0274] In certain embodiments, the method disclosed herein further comprises a step of identifying a guide nucleic acid, a Cas protein, a donor template, or a combination of two or more of these elements from the screening or selection process. A set of barcodes may be used, for example, in the donor template between two homology arms, to facilitate the identification. In specific embodiments, the method further comprises harvesting the population of cells; selectively amplifying a genomic DNA or RNA sample including the target nucleotide sequence(s) and/or the barcodes; and/or sequencing the genomic DNA or RNA sample and/or the barcodes that has been selectively amplified.

[0275] In addition, the present invention provides a library comprising a plurality of guide nucleic acids disclosed herein. In another aspect, the present invention provides a library comprising a plurality of nucleic acids each comprising a regulatory element operably linked to a different guide nucleic acid disclosed herein. These libraries can be used in combination with one or more Cas proteins or Cas-coding nucleic acids disclosed herein, and/or one or more donor templates as disclosed herein for a screening or selection method.

### III. PHARMACEUTICAL COMPOSITIONS

[0276] The present invention provides a composition (e.g., pharmaceutical composition) comprising a guide nucleic acid, an engineered, non-naturally occurring system, or a eukaryotic cell disclosed herein. In certain embodiments, the composition comprises an RNP comprising a guide nucleic acid disclosed herein and a Cas protein (e.g., Cas nuclease). In certain embodiments, the composition comprises a complex of a targeter nucleic acid and a modulator nucleic acid disclosed herein. In certain embodiments, the composition comprises an RNP comprising the targeter nucleic acid, the modulator nucleic acid, and a Cas protein (e.g., Cas nuclease).

[0277] In addition, the present invention provides a method of producing a composition, the method comprising incubating a single guide nucleic acid disclosed herein with a Cas protein, thereby producing a complex of the single guide nucleic acid and the Cas protein (e.g., an RNP). In certain embodiments, the method further comprises purifying the complex (e.g., the RNP).

[0278] In addition, the present invention provides a method of producing a composition, the method comprising incubating a targeter nucleic acid and a modulator nucleic acid disclosed herein under suitable conditions, thereby producing a composition (e.g., pharmaceutical composition) comprising a complex of the targeter nucleic acid and the modulator nucleic acid. In certain embodiments, the method further comprises incubating the targeter nucleic acid and the modulator nucleic acid with a Cas protein (e.g., the Cas nuclease that the targeter nucleic acid and the modulator nucleic acid are capable of activating or a related Cas protein), thereby producing a complex of the targeter nucleic acid, the modulator nucleic acid, and the Cas protein (e.g., an RNP). In certain embodiments, the method further comprises purifying the complex (e.g., the RNP).

[0279] For therapeutic use, a guide nucleic acid, an engineered, non-naturally occurring system, a CRISPR expression system, or a cell comprising such system or modified by such system disclosed herein is combined with a pharmaceutically acceptable carrier. The term “pharmaceutically acceptable” as used herein refers to those compounds, materials, compositions, and/or dosage forms which are, within the scope of sound medical judgment, suitable for use in contact with the tissues of human beings and animals without excessive toxicity, irritation, allergic response, or other problem or complication, commensurate with a reasonable benefit-to-risk ratio.

[0280] The term “pharmaceutically acceptable carrier” as used herein refers to buffers, carriers, and excipients suitable for use in contact with the tissues of human beings and animals without excessive toxicity, irritation, allergic response, or other problem or complication, commensurate with a reasonable benefit/risk ratio. Pharmaceutically acceptable carriers include any of the standard pharmaceutical carriers, such as a phosphate buffered saline solution, water, emulsions (e.g., such as an oil/water or water/oil emulsions), and various types of wetting agents. The compositions also can include stabilizers and preservatives. For examples of carriers, stabilizers and adjuvants, see, e.g., Martin, Remington's Pharmaceutical Sciences, 15th Ed., Mack Publ. Co., Easton, PA (1975). Pharmaceutically acceptable carriers include buffers, solvents, dispersion media, coatings, isotonic and absorption delaying agents, and the like, that are compatible with pharmaceutical administration. The use of such media and agents for pharmaceutically active substances is known in the art.

[0281] In certain embodiments, a pharmaceutical composition disclosed herein comprises a salt, e.g., NaCl, MgCl₂, KCl, MgSO₄, etc.; a buffering agent, e.g., a Tris buffer, N-(2-Hydroxyethyl)piperazine-N′-(2-ethanesulfonic acid) (HEPES), 2-(N-Morpholino)ethanesulfonic acid (MES), MES sodium salt, 3-(N-Morpholino)propanesulfonic acid (MOPS), N-tris[Hydroxymethyl]methyl-3-aminopropanesulfonic acid (TAPS), etc.; a solubilizing agent; a detergent, e.g., a non-ionic detergent such as Tween-20, etc.; a nuclease inhibitor; and the like. For example, in certain embodiments, a subject composition comprises a subject DNA-targeting RNA and a buffer for stabilizing nucleic acids.

[0282] In certain embodiments, a pharmaceutical composition may contain formulation materials for modifying, maintaining or preserving, for example, the pH, osmolarity, viscosity, clarity, color, isotonicity, odor, sterility, stability, rate of dissolution or release, adsorption or penetration of the composition. In such embodiments, suitable formulation materials include, but are not limited to, amino acids (such as glycine, glutamine, asparagine, arginine or lysine); antimicrobials; antioxidants (such as ascorbic acid, sodium sulfite or sodium hydrogen-sulfite); buffers (such as borate, bicarbonate, Tris-HCl, citrates, phosphates or other organic acids); bulking agents (such as mannitol or glycine); chelating agents (such as ethylenediamine tetraacetic acid (EDTA)); complexing agents (such as caffeine, polyvinylpyrrolidone, beta-cyclodextrin or hydroxypropyl-beta-cyclodextrin); fillers; monosaccharides; disaccharides; and other carbohydrates (such as glucose, mannose or dextrins); proteins (such as serum albumin, gelatin or immunoglobulins); coloring, flavoring and diluting agents; emulsifying agents; hydrophilic polymers (such as polyvinylpyrrolidone); low molecular weight polypeptides; salt-forming counterions (such as sodium); preservatives (such as benzalkonium chloride, benzoic acid, salicylic acid, thimerosal, phenethyl alcohol, methylparaben, propylparaben, chlorhexidine, sorbic acid or hydrogen peroxide); solvents (such as glycerin, propylene glycol or polyethylene glycol); sugar alcohols (such as mannitol or sorbitol); suspending agents; surfactants or wetting agents (such as pluronics, PEG, sorbitan esters, polysorbates such as polysorbate 20, polysorbate, triton, tromethamine, lecithin, cholesterol, tyloxapal); stability enhancing agents (such as sucrose or sorbitol); tonicity enhancing agents (such as alkali metal halides, preferably sodium or potassium chloride, mannitol sorbitol); delivery vehicles; diluents; excipients and/or pharmaceutical adjuvants (see, Remington's Pharmaceutical Sciences, 18th ed. (Mack Publishing Company, 1990).

[0283] In certain embodiments, a pharmaceutical composition may contain nanoparticles, e.g., polymeric nanoparticles, liposomes, or micelles (See Anselmo et al. (2016) BIOENG. TRANSL. MED. 1: 10-29). In certain embodiment, the pharmaceutical composition comprises an inorganic nanoparticle. Exemplary inorganic nanoparticles include, e.g., magnetic nanoparticles (e.g., Fe₃MnO₂) or silica. The outer surface of the nanoparticle can be conjugated with a positively charged polymer (e.g., polyethylenimine, polylysine, polyserine) which allows for attachment (e.g., conjugation or entrapment) of payload. In certain embodiment, the pharmaceutical composition comprises an organic nanoparticle (e.g., entrapment of the payload inside the nanoparticle). Exemplary organic nanoparticles include, e.g., SNALP liposomes that contain cationic lipids together with neutral helper lipids which are coated with polyethylene glycol (PEG) and protamine and nucleic acid complex coated with lipid coating. In certain embodiment, the pharmaceutical composition comprises a liposome, for example, a liposome disclosed in International (PCT) Publication No. WO2015/148863.

[0284] In certain embodiments, the pharmaceutical composition comprises a targeting moiety to increase target cell binding or update of nanoparticles and liposomes. Exemplary targeting moieties include cell specific antigens, monoclonal antibodies, single chain antibodies, aptamers, polymers, sugars, and cell penetrating peptides. In certain embodiments, the pharmaceutical composition comprises a fusogenic or endosome-destabilizing peptide or polymer.

[0285] In certain embodiments, a pharmaceutical composition may contain a sustained- or controlled-delivery formulation. Techniques for formulating sustained- or controlled-delivery means, such as liposome carriers, bio-erodible microparticles or porous beads and depot injections, are also known to those skilled in the art. Sustained-release preparations may include, e.g., porous polymeric microparticles or semipermeable polymer matrices in the form of shaped articles, e.g., films, or microcapsules. Sustained release matrices may include polyesters, hydrogels, polylactides, copolymers of L-glutamic acid and gamma ethyl-L-glutamate, poly (2-hydroxyethyl-inethacrylate), ethylene vinyl acetate, or poly-D(−)-3-hydroxybutyric acid. Sustained release compositions may also include liposomes that can be prepared by any of several methods known in the art.

[0286] A pharmaceutical composition of the invention can be administered by a variety of methods known in the art. The route and/or mode of administration vary depending upon the desired results. Administration can be intravenous, intramuscular, intraperitoneal, or subcutaneous, or administered proximal to the site of the target. The pharmaceutically acceptable carrier should be suitable for intravenous, intramuscular, subcutaneous, parenteral, spinal or epidermal administration (e.g., by injection or infusion). Depending on the route of administration, the active compound (e.g., the guide nucleic acid, engineered, non-naturally occurring system, or CRISPR expression system of the invention) may be coated in a material to protect the compound from the action of acids and other natural conditions that may inactivate the compound.

[0287] Formulation components suitable for parenteral administration include a sterile diluent such as water for injection, saline solution, fixed oils, polyethylene glycols, glycerin, propylene glycol or other synthetic solvents; antibacterial agents such as benzyl alcohol or methyl parabens; antioxidants such as ascorbic acid or sodium bisulfite; chelating agents such as EDTA; buffers such as acetates, citrates or phosphates; and agents for the adjustment of tonicity such as sodium chloride or dextrose.

[0288] For intravenous administration, suitable carriers include physiological saline, bacteriostatic water, Cremophor EL™ (BASF, Parsippany, NJ) or phosphate buffered saline (PBS). The carrier should be stable under the conditions of manufacture and storage, and should be preserved against microorganisms. The carrier can be a solvent or dispersion medium containing, for example, water, ethanol, polyol (for example, glycerol, propylene glycol, and liquid polyetheylene glycol), and suitable mixtures thereof.

[0289] Pharmaceutical formulations preferably are sterile. Sterilization can be accomplished by any suitable method, e.g., filtration through sterile filtration membranes. Where the composition is lyophilized, filter sterilization can be conducted prior to or following lyophilization and reconstitution. In certain embodiments, the pharmaceutical composition is lyophilized, and then reconstituted in buffered saline, at the time of administration.

[0290] Pharmaceutical compositions of the invention can be prepared in accordance with methods well known and routinely practiced in the art. See, e.g., Remington: The Science and Practice of Pharmacy, Mack Publishing Co., 20th ed., 2000; and Sustained and Controlled Release Drug Delivery Systems, J. R. Robinson, ed., Marcel Dekker, Inc., New York, 1978. Pharmaceutical compositions are preferably manufactured under GMP conditions. Typically, a therapeutically effective dose or efficacious dose of the guide nucleic acid, engineered, non-naturally occurring system, or CRISPR expression system of the invention is employed in the pharmaceutical compositions of the invention. The multispecific antibodies of the invention are formulated into pharmaceutically acceptable dosage forms by conventional methods known to those of skill in the art. Dosage regimens are adjusted to provide the optimum desired response (e.g., a therapeutic response). For example, a single bolus may be administered, several divided doses may be administered over time or the dose may be proportionally reduced or increased as indicated by the exigencies of the therapeutic situation. It is especially advantageous to formulate parenteral compositions in dosage unit form for ease of administration and uniformity of dosage. Dosage unit form as used herein refers to physically discrete units suited as unitary dosages for the subjects to be treated; each unit contains a predetermined quantity of active compound calculated to produce the desired therapeutic effect in association with the required pharmaceutical carrier.

[0291] Actual dosage levels of the active ingredients in the pharmaceutical compositions of the invention can be varied so as to obtain an amount of the active ingredient which is effective to achieve the desired therapeutic response for a particular patient, composition, and mode of administration, without being toxic to the patient. The selected dosage level depends upon a variety of pharmacokinetic factors including the activity of the particular compositions of the present invention employed, or the ester, salt or amide thereof, the route of administration, the time of administration, the rate of excretion of the particular compound being employed, the duration of the treatment, other drugs, compounds and/or materials used in combination with the particular compositions employed, the age, sex, weight, condition, general health and prior medical history of the patient being treated, and like factors.

### IV. THERAPEUTIC USES

[0292] The guide nucleic acids, the engineered, non-naturally occurring systems, and the CRISPR expression systems disclosed herein are useful for targeting, editing, and/or modifying the genomic DNA in a cell or organism. These guide nucleic acids and systems, as well as a cell comprising one of the systems or a cell whose genome has been modified by one of the systems, can be used to treat a disease or disorder in which modification of genetic or epigenetic information is desirable. Accordingly, the present invention provides a method of treating a disease or disorder, the method comprising administering to a subject in need thereof a guide nucleic acid, a non-naturally occurring system, a CRISPR expression system, or a cell disclosed herein.

[0293] The term “subject” includes human and non-human animals. Non-human animals include all vertebrates, e.g., mammals and non-mammals, such as non-human primates, sheep, dog, cow, chickens, amphibians, and reptiles. Except when noted, the terms “patient” or “subject” are used herein interchangeably.

[0294] The terms “treatment”, “treating”, “treat”, “treated”, and the like, as used herein, include obtaining a desired pharmacologic and/or physiologic effect. The effect may be therapeutic in terms of a partial or complete cure for a disease and/or adverse effect attributable to the disease or delaying the disease progression. “Treatment”, as used herein, covers any treatment of a disease in a mammal, e.g., in a human, and includes: (a) inhibiting the disease, i.e., arresting its development; and (b) relieving the disease, i.e., causing regression of the disease. It is understood that a disease or disorder may be identified by genetic methods and treated prior to manifestation of any medical symptom.

[0295] For minimization of toxicity and off-target effect, it is important to control the concentration of the CRISPR-Cas system delivered. Optimal concentrations can be determined by testing different concentrations in a cellular, tissue, or non-human eukaryote animal model and using deep sequencing to analyze the extent of modification at potential off-target genomic loci. The concentration that gives the highest level of on-target modification while minimizing the level of off-target modification should be selected for ex vivo or in vivo delivery.

[0296] It is understood that the guide nucleic acid, the engineered, non-naturally occurring system, and the CRISPR expression system disclosed herein can be used to treat any disease or disorder that can be improved by editing or modifying human APLNR, BBS1, CALR, CD247, CD3D, CD38, CD3E, CD3G, CD40LG, CD52, CD58, COL17A1, CSF2, DEFB134, ERAP1, ERAP2, IFNGR1, IFNGR2, JAK1, JAK2, mir-101-2, MLANA, NLRC5 PSMB5, PSMB8, PSMB9, PTCD2, RFX5, RFXANK, RFXAP, RPL23, SOX10, SRP54, STAT1, Tap1, TAP2, TAPBP, TRBC1, TRBC1_2 (or TRBC1+2), TRBC2, or TWF1 gene in a cell. In certain embodiments, the guide nucleic acid, the engineered, non-naturally occurring system, and the CRISPR expression system disclosed herein can be used to engineer an immune cell. Immune cells include but are not limited to lymphocytes (e.g., B lymphocytes or B cells, T lymphocytes or T cells, and natural killer cells), myeloid cells (e.g., monocytes, macrophages, eosinophils, mast cells, basophils, and granulocytes), and the stem and progenitor cells that can differentiate into these cell types (e.g., hematopoietic stem cells, hematopoietic progenitor cells, and lymphoid progenitor cells). The cells can include autologous cells derived from a subject to be treated, or alternatively allogenic cells derived from a donor.

[0297] In certain embodiments, the immune cell is a T cell, which can be, for example, a cultured T cell, a primary T cell, a T cell from a cultured T cell line (e.g., Jurkat, SupTi), or a T cell obtained from a mammal, for example, from a subject to be treated. If obtained from a mammal, the T cell can be obtained from numerous sources, including but not limited to blood, bone marrow, lymph node, the thymus, or other tissues or fluids. T cells can also be enriched or purified. The T cell can be any type of T cell and can be of any developmental stage, including but not limited to, CD4⁺/CD8⁺ double positive T cells, CD4⁺ helper T cells (e.g., Th1 and Th2 cells), CD8⁺ T cells (e.g., cytotoxic T cells), tumor infiltrating lymphocytes (TILs), memory T cells (e.g., central memory T cells and effector memory T cells), regulatory T cells, naive T cells, and the like.

[0298] In certain embodiments, an immune cell, e.g., a T cell, is engineered to express an exogenous gene. For example, in certain embodiments, the guide nucleic acid, the engineered, non-naturally occurring system, and the CRISPR expression system disclosed herein may be used to engineer an immune cell to express an exogenous gene at the locus of a human APLNR, BBS1, CALR, CD247, CD3D, CD38, CD3E, CD3G, CD40LG, CD52, CD58, COL17A1, CSF2, DEFB134, ERAP1, ERAP2, IFNGR1, IFNGR2, JAK1, JAK2, mir-101-2, MLANA, NLRC5 PSMB5, PSMB8, PSMB9, PTCD2, RFX5, RFXANK, RFXAP, RPL23, SOX10, SRP54, STAT1, Tap1, TAP2, TAPBP, TRBC1, TRBC1_2 (or TRBC1+2), TRBC2, or TWF1 gene. For example, in certain embodiments, an engineered CRISPR system disclosed herein may catalyze DNA cleavage at the gene locus, allowing for site-specific integration of the exogenous gene at the gene locus by HDR.

[0299] In certain embodiments, an immune cell, e.g., a T cell, is engineered to express a chimeric antigen receptor (CAR), i.e., the T cell comprises an exogenous nucleotide sequence encoding a CAR. As used herein, the term “chimeric antigen receptor” or “CAR” refers to any artificial receptor including an antigen-specific binding moiety and one or more signaling chains derived from an immune receptor. CARs can comprise a single chain fragment variable (scFv) of an antibody specific for an antigen coupled via hinge and transmembrane regions to cytoplasmic domains of T cell signaling molecules, e.g., a T cell costimulatory domain (e.g., from CD28, CD137, OX40, ICOS, or CD27) in tandem with a T cell triggering domain (e.g., from CD3ζ). A T cell expressing a chimeric antigen receptor is referred to as a CAR T cell. Exemplary CAR T cells include CD19 targeted CTL019 cells (see, Grupp et al. (2015) BLOOD, 126: 4983), 19-28z cells (see, Park et al. (2015) J. CLIN. ONCOL., 33: 7010), and KTE-C19 cells (see, Locke et al. (2015) BLOOD, 126: 3991). Additional exemplary CAR T cells are described in U.S. Pat. Nos. 8,399,645, 8,906,682, 7,446,190, 9,181,527, 9,272,002, 9,266,960, 10,253,086, 10,808,035, and 10,640,569, and International (PCT) Publication Nos. WO2013/142034, WO2015/120180, WO2015/188141, WO2016/120220, and WO2017/040945. Exemplary approaches to express CARs using CRISPR systems are described in Hale et al. (2017) MOL THER METHODS CLIN DEV., 4: 192, MacLeod et al. (2017) MOL THER, 25: 949, and Eyquem et al. (2017) NATURE, 543: 113.

[0300] In certain embodiments, an immune cell, e.g., a T cell, binds an antigen, e.g., a cancer antigen, through an endogenous T cell receptor (TCR). In certain embodiments, an immune cell, e.g., a T cell, is engineered to express an exogenous TCR, e.g., an exogenous naturally occurring TCR or an exogenous engineered TCR. T cell receptors comprise two chains referred to as the α- and β-chains, that combine on the surface of a T cell to form a heterodimeric receptor that can recognize MHC-restricted antigens. Each of α- and β-chain comprises a constant region and a variable region. Each variable region of the α- and β-chains defines three loops, referred to as complementary determining regions (CDRs) known as CDR₁, CDR₂, and CDR₃ that confer the T cell receptor with antigen binding activity and binding specificity.

[0301] In certain embodiments, a CAR or TCR binds a cancer antigen selected from B-cell maturation antigen (BCMA), mesothelin, prostate specific membrane antigen (PSMA), prostate stem cell antigen (PCSA), carbonic anhydrase IX (CAIX), carcinoembryonic antigen (CEA), CD5, CD7, CD10, CD19, CD20, CD22, CD30, CD33, CD34, CD38, CD41, CD44, CD49f, CD56, CD70, CD74, CD123, CD133, CD138, epithelial glycoprotein2 (EGP 2), epithelial glycoprotein-40 (EGP-40), epithelial cell adhesion molecule (EpCAM), receptor-type tyrosine-protein kinase (FLT3), folate-binding protein (FBP), fetal acetylcholine receptor (AChR), folate receptor-α and β (FRa and β), Ganglioside G2 (GD2), Ganglioside G3 (GD3), epidermal growth factor receptor 2 (HER-2/ERB2), epidermal growth factor receptor vIII (EGFRvIII), ERB3, ERB4, human telom erase reverse transcriptase (hTERT), Interleukin-13 receptor subunit alpha-2 (IL-13Ra2), K-light chain, kinase insert domain receptor (KDR), Lewis A (CA19.9), Lewis Y (LeY), LI cell adhesion molecule (LICAM), melanoma-associated antigen 1 (melanoma antigen family A1, MAGE-A1), Mucin 16 (MUC-16), Mucin 1 (MUC-1; e.g., a truncated MUC-1), KG2D ligands, cancer-testis antigen NY-ESO-1, oncofetal antigen (h5T4), tumor-associated glycoprotein 72 (TAG-72), vascular endothelial growth factor R2 (VEGF-R2), Wilms tumor protein (WT-1), type 1 tyrosine-protein kinase transmembrane receptor (ROR1), B7-H3 (CD276), B7-H6 (Nkp30), Chondroitin sulfate proteoglycan-4 (CSPG4), DNAX Accessory Molecule (DNAM-1), Ephrin type A Receptor 2 (EpHA2), Fibroblast Associated Protein (FAP), Gp100/HLA-A2, Glypican 3 (GPC3), HA-IH, HERK-V, IL-1 IRa, Latent Membrane Protein 1 (LMP1), Neural cell-adhesion molecule (N-CAM/CD56), and Trail Receptor (TRAIL-R).

[0302] Genetic loci suitable for insertion of a CAR- or exogenous TCR-encoding sequence include but are not limited to TCR subunit loci (e.g., the TCRα constant (TRAC) locus, the TCRβ constant 1 (TRBC1) locus, and the TCRβ constant 2 (TRBC2) locus). It is understood that insertion in the TRAC locus reduces tonic CAR signaling and enhances T cell potency (see, Eyquem et al. (2017) NATURE, 543: 113). Furthermore, inactivation of the endogenous TRAC, TRBC1, or TRBC2 gene may reduce a graft-versus-host disease (GVHD) response, thereby allowing use of allogeneic T cells as starting materials for preparation of CAR-T cells. Accordingly, in certain embodiments, an immune cell, e.g., a T cell, is engineered to have reduced expression of an endogenous TCR or TCR subunit, e.g., TRAC, TRBC1, and/or TRBC2. The cell may be engineered to have partially reduced or no expression of the endogenous TCR or TCR subunit. For example, in certain embodiments, the immune cell, e.g., a T cell, is engineered to have less than 80% (e.g., less than 70%, less than 60%, less than 50%, less than 40%, less than 30%, less than 20%, less than 10%, or less than 5%) of the expression of the endogenous TCR or TCR subunit relative to a corresponding unmodified or parental cell. In certain embodiments, the immune cell, e.g., a T cell, is engineered to have no detectable expression of the endogenous TCR or TCR subunit. Exemplary approaches to reduce expression of TCRs using CRISPR systems are described in U.S. Pat. No. 9,181,527, Liu et al. (2017) CELL RES, 27: 154, Ren et al. (2017) CLIN CANCER RES, 23: 2255, Cooper et al. (2018) LEUKEMIA, 32: 1970, and Ren et al. (2017) ONCOTARGET, 8: 17002.

[0303] It is understood that certain immune cells, such as T cells, also express major histocompatibility complex (MHC) or human leukocyte antigen (HLA) genes, and inactivation of these endogenous gene may reduce a GVHD response, thereby allowing use of allogeneic T cells as starting materials for preparation of CAR-T cells. Accordingly, in certain embodiments, an immune cell, e.g., a T-cell, is engineered to have reduced expression of one or more endogenous class I or class II MHCs or HLAs (e.g., beta 2-microglobulin (B2M), class II major histocompatibility complex transactivator (CIITA), HLA-E, and/or HLA-G). The cell may be engineered to have partially reduced or no expression of an endogenous MHC or HLA. For example, in certain embodiments, the immune cell, e.g., a T-cell, is engineered to have less than less than 80% (e.g., less than 70%, less than 60%, less than 50%, less than 40%, less than 30%, less than 20%, less than 10%, or less than 5%) of the expression of endogenous MHC (e.g., B2M, CIITA, HLA-E, or HLA-G) relative to a corresponding unmodified or parental cell. In certain embodiments, the immune cell, e.g., a T cell, is engineered to have no detectable expression of an endogenous MHC (e.g., B2M, CIITA, HLA-E, or HLA-G). Exemplary approaches to reduce expression of MHCs using CRISPR systems are described in Liu et al. (2017) CELL RES, 27: 154, Ren et al. (2017) CLIN CANCER RES, 23: 2255, and Ren et al. (2017) ONCOTARGET, 8: 17002. Additional gene targets include but are not limited to B2M, CD247, CD3D, CD3E, CD3G, CIITA, NLRC5, TRAC, and TRBC1/2.

[0304] Other genes that may be inactivated to reduce a GVHD response include but are not limited to CD3, CD52, and deoxycytidine kinase (DCK). For example, inactivation of DCK may render the immune cells (e.g., T cells) resistant to purine nucleotide analogue (PNA) compounds, which are often used to compromise the host immune system in order to reduce a GVHD response during an immune cell therapy. In certain embodiments, the immune cell, e.g., a T-cell, is engineered to have less than less than 80% (e.g., less than 70%, less than 60%, less than 50%, less than 40%, less than 30%, less than 20%, less than 10%, or less than 5%) of the expression of endogenous CD52 or DCK relative to a corresponding unmodified or parental cell.

[0305] It is understood that the activity of an immune cell (e.g., T cell) may be enhanced by inactivating or reducing the expression of an immune suppressor such as an immune checkpoint protein. Accordingly, in certain embodiments, an immune cell, e.g., a T cell, is engineered to have reduced expression of an immune checkpoint protein. Exemplary immune checkpoint proteins expressed by wild-type T cells include but are not limited to PDCD1 (PD-1), CTLA4, ADORA2A (A2AR), B7-H3, B7-H4, BTLA, KIR, LAG3, HAVCR2 (TIM3), TIGIT, VISTA, PTPN6 (SHP-1), and FAS. The cell may be modified to have partially reduced or no expression of the immune checkpoint protein. For example, in certain embodiments, the immune cell, e.g., a T cell, is engineered to have less than 80% (e.g., less than 70%, less than 60%, less than 50%, less than 40%, less than 30%, less than 20%, less than 10%, or less than 5%) of the expression of the immune checkpoint protein relative to a corresponding unmodified or parental cell. In certain embodiments, the immune cell, e.g., a T cell, is engineered to have no detectable expression of the immune checkpoint protein. Exemplary approaches to reduce expression of immune checkpoint proteins using CRISPR systems are described in International (PCT) Publication No. WO2017/017184, Cooper et al. (2018) LEUKEMIA, 32: 1970, Su et al. (2016) ONCOIMMUNOLOGY, 6: e1249558, and Zhang et al. (2017) FRONT MED, 11: 554.

[0306] The immune cell can be engineered to have reduced expression of an endogenous gene, e.g., an endogenous genes described above, by gene editing or modification. For example, in certain embodiments, an engineered CRISPR system disclosed herein may result in DNA cleavage at a gene locus, thereby inactivating the targeted gene. In other embodiments, an engineered CRISPR system disclosed herein may be fused to an effector domain (e.g., a transcriptional repressor or histone methylase) to reduce the expression of the target gene.

[0307] The immune cell can also be engineered to express an exogenous protein (besides an antigen-binding protein described above) at the locus of a human APLNR, BBS1, CALR, CD247, CD3D, CD38, CD3E, CD3G, CD40LG, CD52, CD58, COL17A1, CSF2, DEFB134, ERAP1, ERAP2, IFNGR1, IFNGR2, JAK1, JAK2, mir-101-2, MLANA, NLRC5 PSMB5, PSMB8, PSMB9, PTCD2, RFX5, RFXANK, RFXAP, RPL23, SOX10, SRP54, STAT1, Tap1, TAP2, TAPBP, TRBC1, TRBC1_2 (or TRBC1+2), TRBC2, or TWF1 gene.

[0308] In certain embodiments, an immune cell, e.g., a T cell, is modified to express a dominant-negative form of an immune checkpoint protein. In certain embodiments, the dominant-negative form of the checkpoint inhibitor can act as a decoy receptor to bind or otherwise sequester the natural ligand that would otherwise bind and activate the wild-type immune checkpoint protein. Examples of engineered immune cells, for example, T cells containing dominant-negative forms of an immune suppressor are described, for example, in International (PCT) Publication No. WO2017/040945.

[0309] In certain embodiments, an immune cell, e.g., a T cell, is modified to express a gene (e.g., a transcription factor, a cytokine, or an enzyme) that regulates the survival, proliferation, activity, or differentiation (e.g., into a memory cell) of the immune cell. In certain embodiments, the immune cell is modified to express TET2, FOXO1, IL-12, IL-15, IL-18, IL-21, IL-7, GLUT1, GLUT3, HK1, HK2, GAPDH, LDHA, PDK1, PKM2, PFKFB3, PGK1, ENO1, GYS1, and/or ALDOA. In certain embodiments, the modification is an insertion of a nucleotide sequence encoding the protein operably linked to a regulatory element. In certain embodiments, the modification is a substitution of a single nucleotide polymorphism (SNP) site in the endogenous gene. In certain embodiments, an immune cell, e.g., a T cell, is modified to express a variant of a gene, for example, a variant that has greater activity than the respective wild-type gene. In certain embodiments, the immune cell is modified to express a variant of CARD11, CD247, IL7R, LCK, or PLCG1. For example, certain gain-of-function variants of IL7R were disclosed in Zenatti et al., (2011) NAT. GENET. 43(10):932-39. The variant can be expressed from the native locus of the respective wild-type gene by delivering an engineered system described herein for targeting the native locus in combination with a donor template that carries the variant or a portion thereof.

[0310] In certain embodiments, an immune cell, e.g., a T cell, is modified to express a protein (e.g., a cytokine or an enzyme) that regulates the microenvironment that the immune cell is designed to migrate to (e.g., a tumor microenvironment). In certain embodiments, the immune cell is modified to express CA9, CA12, a V-ATPase subunit, NHE1, and/or MCT-1.

### V. KITS

[0311] It is understood that the guide nucleic acid, the engineered, non-naturally occurring system, the CRISPR expression system, and the library disclosed herein can be packaged in a kit suitable for use by a medical provider. Accordingly, in another aspect, the invention provides kits containing any one or more of the elements disclosed in the above systems, libraries, methods, and compositions. In certain embodiments, the kit comprises an engineered, non-naturally occurring system as disclosed herein and instructions for using the kit. The instructions may be specific to the applications and methods described herein. In certain embodiments, one or more of the elements of the system are provided in a solution. In certain embodiments, one or more of the elements of the system are provided in lyophilized form, and the kit further comprises a diluent. Elements may be provided individually or in combinations, and may be provided in any suitable container, such as a vial, a bottle, a tube, or immobilized on the surface of a solid base (e.g., chip or microarray). In certain embodiments, the kit comprises one or more of the nucleic acids and/or proteins described herein. In certain embodiments, the kit provides all elements of the systems of the invention.

[0312] In certain embodiments of a kit comprising the engineered, non-naturally occurring dual guide system, the targeter nucleic acid and the modulator nucleic acid are provided in separate containers. In other embodiments, the targeter nucleic acid and the modulator nucleic acid are pre-complexed, and the complex is provided in a single container.

[0313] In certain embodiments, the kit comprises a Cas protein or a nucleic acid comprising a regulatory element operably linked to a nucleic acid encoding a Cas protein provided in a separate container. In other embodiments, the kit comprises a Cas protein pre-complexed with the single guide nucleic acid or a combination of the targeter nucleic acid and the modulator nucleic acid, and the complex is provided in a single container.

[0314] In certain embodiments, the kit further comprises one or more donor templates provided in one or more separate containers. In certain embodiments, the kit comprises a plurality of donor templates as disclosed herein (e.g., in separate tubes or immobilized on the surface of a solid base such as a chip or a microarray), one or more guide nucleic acids disclosed herein, and optionally a Cas protein or a regulatory element operably linked to a nucleic acid encoding a Cas protein as disclosed herein. Such kits are useful for identifying a donor template that introduces optimal genetic modification in a multiplex assay. The CRISPR expression systems as disclosed herein are also suitable for use in a kit.

[0315] In certain embodiments, a kit further comprises one or more reagents and/or buffers for use in a process utilizing one or more of the elements described herein. Reagents may be provided in any suitable container and may be provided in a form that is usable in a particular assay, or in a form that requires addition of one or more other components before use (e.g., in concentrate or lyophilized form). A buffer may be a reaction or storage buffer, including but not limited to a sodium carbonate buffer, a sodium bicarbonate buffer, a borate buffer, a Tris buffer, a MOPS buffer, a HEPES buffer, and combinations thereof. In some embodiments, the buffer is alkaline. In certain embodiments, the buffer has a pH from 6-9, 6.5-8.5, 7-8, 6.5-7.5, 6-8, 7.5-8.5, 7-9, 6.5-9.5, 6-10, 8-9, 7.5-9.5, 7-10, for example 7-8, such as 7.5. In certain embodiments, the kit further comprises a pharmaceutically acceptable carrier. In certain embodiments, the kit further comprises one or more devices or other materials for administration to a subject.

[0316] Throughout the description, where compositions are described as having, including, or comprising specific components, or where processes and methods are described as having, including, or comprising specific steps, it is contemplated that, additionally, there are compositions of the present invention that consist essentially of, or consist of, the recited components, and that there are processes and methods according to the present invention that consist essentially of, or consist of, the recited processing steps.

[0317] In the application, where an element or component is said to be included in and/or selected from a list of recited elements or components, it should be understood that the element or component can be any one of the recited elements or components, or the element or component can be selected from a group consisting of two or more of the recited elements or components.

[0318] Further, it should be understood that elements and/or features of a composition or a method described herein can be combined in a variety of ways without departing from the spirit and scope of the present invention, whether explicit or implicit herein. For example, where reference is made to a particular compound, that compound can be used in various embodiments of compositions of the present invention and/or in methods of the present invention, unless otherwise understood from the context. In other words, within this application, embodiments have been described and depicted in a way that enables a clear and concise application to be written and drawn, but it is intended and will be appreciated that embodiments may be variously combined or separated without parting from the present teachings and invention(s). For example, it will be appreciated that all features described and depicted herein can be applicable to all aspects of the invention(s) described and depicted herein.

[0319] The terms “a” and “an” and “the” and similar references in the context of describing the invention (especially in the context of the following claims) are to be construed to cover both the singular and the plural, unless otherwise indicated herein or clearly contradicted by context. For example, the term “a cell” includes a plurality of cells, including mixtures thereof. Where the plural form is used for compounds, salts, and the like, this is taken to mean also a single compound, salt, or the like.

[0320] It should be understood that the expression “at least one of” includes individually each of the recited objects after the expression and the various combinations of two or more of the recited objects unless otherwise understood from the context and use. The expression “and/or” in connection with three or more recited objects should be understood to have the same meaning unless otherwise understood from the context.

[0321] The use of the term “include,” “includes,” “including,” “have,” “has,” “having,” “contain,” “contains,” or “containing,” including grammatical equivalents thereof, should be understood generally as open-ended and non-limiting, for example, not excluding additional unrecited elements or steps, unless otherwise specifically stated or understood from the context.

[0322] Where the use of the term “about” is before a quantitative value, the present invention also includes the specific quantitative value itself, unless specifically stated otherwise. As used herein, the term “about” refers to a ±10% variation from the nominal value unless otherwise indicated or inferred.

[0323] It should be understood that the order of steps or order for performing certain actions is immaterial so long as the present invention remain operable. Moreover, two or more steps or actions may be conducted simultaneously.

[0324] The use of any and all examples, or exemplary language herein, for example, “such as” or “including,” is intended merely to illustrate better the present invention and does not pose a limitation on the scope of the invention unless claimed. No language in the specification should be construed as indicating any non-claimed element as essential to the practice of the present invention.

### Embodiments

[0325] In embodiment 1 provided herein is a guide nucleic acid comprising a targeter stem sequence and a spacer sequence, wherein the spacer sequence comprises a nucleotide sequence listed in Table 1, 2, 3, 4, 5, 6, 7, 8, or 9. In embodiment 2 provided herein is the guide nucleic acid of embodiment 1, wherein the targeter stem sequence comprises a nucleotide sequence of GUAGA. In embodiment 3 provided herein is the guide nucleic acid of embodiment 1 or 2, wherein the targeter stem sequence is 5′ to the spacer sequence, optionally wherein the targeter stem sequence is linked to the spacer sequence by a linker consisting of 1, 2, 3, 4, or 5 nucleotides. In embodiment 4 provided herein is the guide nucleic acid of any one of embodiments 1-3, wherein the guide nucleic acid is capable of activating a CRISPR Associated (Cas) nuclease in the absence of a tracrRNA. In embodiment 5 provided herein is the guide nucleic acid of embodiment 4, wherein the guide nucleic acid comprises from 5′ to 3′ a modulator stem sequence, a loop sequence, a targeter stem sequence, and the spacer sequence. In embodiment 6 provided herein is the guide nucleic acid of any one of embodiments 1-3, wherein the guide nucleic acid is a targeter nucleic acid that, in combination with a modulator nucleic acid, is capable of activating a Cas nuclease. In embodiment 7 provided herein is the guide nucleic acid of embodiment 6, wherein the guide nucleic acid comprises from 5′ to 3′ a targeter stem sequence and the spacer sequence. In embodiment 8 provided herein is the guide nucleic acid of any one of embodiments 4-7, wherein the Cas nuclease is a type V Cas nuclease. In embodiment 9 provided herein is the guide nucleic acid of embodiment 8, wherein the Cas nuclease is a type V-A Cas nuclease. In embodiment 10 provided herein is the guide nucleic acid of embodiment 9, wherein the Cas nuclease comprises an amino acid sequence at least 80% identical to SEQ ID NO: 1. In embodiment 11 provided herein is the guide nucleic acid of embodiment 9, wherein the Cas nuclease is Cpf1. In embodiment 12 provided herein is the guide nucleic acid of any one of embodiments 4-11, wherein the Cas nuclease recognizes a protospacer adjacent motif (PAM) consisting of the nucleotide sequence of TTTN or CTTN. In embodiment 13 provided herein is the guide nucleic acid of any one of the proceeding embodiments, wherein the guide nucleic acid comprises a ribonucleic acid (RNA). In embodiment 14 provided herein is the guide nucleic acid of embodiment 13, wherein the guide nucleic acid comprises a modified RNA. In embodiment 15 provided herein is the guide nucleic acid of embodiment 13 or 14, wherein the guide nucleic acid comprises a combination of RNA and DNA. In embodiment 16 provided herein is the guide nucleic acid of any one of embodiments 13-15, wherein the guide nucleic acid comprises a chemical modification. In embodiment 17 provided herein is the guide nucleic acid of embodiment 16, wherein the chemical modification is present in one or more nucleotides at the 5′ end of the guide nucleic acid. In embodiment 18 provided herein is the guide nucleic acid of embodiment 16 or 17, wherein the chemical modification is present in one or more nucleotides at the 3′ end of the guide nucleic acid. In embodiment 19 provided herein is the guide nucleic acid of any one of embodiments 16-18, wherein the chemical modification is selected from the group consisting of 2′-O-methyl, 2′-fluoro, 2′-O-methoxyethyl, phosphorothioate, phosphorodithioate, pseudouridine, and any combinations thereof. In embodiment 20 provided herein is an engineered, non-naturally occurring system comprising the guide nucleic acid of any one of embodiments 4-5 and 8-19. In embodiment 21 provided herein is the engineered, non-naturally occurring system of embodiment 20, further comprising the Cas nuclease. In embodiment 22 provided herein is the engineered, non-naturally occurring system of embodiment 21, wherein the guide nucleic acid and the Cas nuclease are present in a ribonucleoprotein (RNP) complex. In embodiment 23 provided herein is an engineered, non-naturally occurring system comprising the guide nucleic acid of any one of embodiments 6-19, further comprising the modulator nucleic acid. In embodiment 24 provided herein is the engineered, non-naturally occurring system of embodiment 23, further comprising the Cas nuclease. In embodiment 25 provided herein is the engineered, non-naturally occurring system of embodiment 24, wherein the guide nucleic acid, the modulator nucleic acid, and the Cas nuclease are present in an RNP complex. In embodiment 26 provided herein is the engineered, non-naturally occurring system of any one of embodiments 1-25, wherein the spacer sequence comprises a nucleotide sequence selected from the group consisting of SEQ ID NOs: 201-253, and wherein the spacer sequence is capable of hybridizing with the human CSF2 gene. In embodiment 27 provided herein is the engineered, non-naturally occurring system of embodiment 26, wherein, when the system is delivered into a population of human cells ex vivo, the genomic sequence at the CSF2 gene locus is edited in at least 1.5% of the cells. In embodiment 28 provided herein is the engineered, non-naturally occurring system of any one of embodiments 1-25, wherein the spacer sequence comprises a nucleotide sequence selected from the group consisting of SEQ ID NOs: 254-313, and wherein the spacer sequence is capable of hybridizing with the human CD40LG gene. In embodiment 29 provided herein is the engineered, non-naturally occurring system of embodiment 28, wherein, when the system is delivered into a population of human cells ex vivo, the genomic sequence at the CD40LG gene locus is edited in at least 1.5% of the cells. In embodiment 30 provided herein is the engineered, non-naturally occurring system of any one of embodiments 1-25, wherein the spacer sequence comprises a nucleotide sequence selected from the group consisting of SEQ ID NOs: 314-319 and 329-332, and wherein the spacer sequence is capable of hybridizing with the human TRBC1 gene. In embodiment 31 provided herein is the engineered, non-naturally occurring system of embodiment 30, wherein, when the system is delivered into a population of human cells ex vivo, the genomic sequence at the TRBC1 gene locus is edited in at least 1.5% of the cells. In embodiment 32 provided herein is the engineered, non-naturally occurring system of any one of embodiments 1-25, wherein the spacer sequence comprises a nucleotide sequence selected from the group consisting of SEQ ID NOs: 320-328 and 329-332, and wherein the spacer sequence is capable of hybridizing with the human TRBC2 gene. In embodiment 33 provided herein is the engineered, non-naturally occurring system of embodiment 32, wherein, when the system is delivered into a population of human cells ex vivo, the genomic sequence at the TRBC2 gene locus is edited in at least 1.5% of the cells. In embodiment 34 provided herein is the engineered, non-naturally occurring system of any one of embodiments 1-25, wherein the spacer sequence comprises a nucleotide sequence selected from the group consisting of SEQ ID NOs: 329-332, and wherein the spacer sequence is capable of hybridizing with both the human TRBC1 gene and the human TRBC2 gene. In embodiment 35 provided herein is the engineered, non-naturally occurring system of embodiment 34, wherein, when the system is delivered into a population of human cells ex vivo, the genomic sequence at both the human TRBC1 gene and the human TRBC2 gene locus is edited in at least 1.5% of the cells. In embodiment 36 provided herein is the engineered, non-naturally occurring system of any one of embodiments 1-25, wherein the spacer sequence comprises a nucleotide sequence selected from the group consisting of SEQ ID NOs: 333-374 and wherein the spacer sequence is capable of hybridizing with the human CD3E gene. In embodiment 37 provided herein is the engineered, non-naturally occurring system of embodiment 36, wherein, when the system is delivered into a population of human cells ex vivo, the genomic sequence at the CD3E gene locus is edited in at least 1.5% of the cells. In embodiment 38 provided herein is the engineered, non-naturally occurring system of any one of embodiments 1-25, wherein the spacer sequence comprises a nucleotide sequence selected from the group consisting of SEQ ID NOs: 375-411, and wherein the spacer sequence is capable of hybridizing with the human CD38 gene. In embodiment 39 provided herein is the engineered, non-naturally occurring system of embodiment 38, wherein, when the system is delivered into a population of human cells ex vivo, the genomic sequence at the CD38 gene locus is edited in at least 1.5% of the cells. In embodiment 40 provided herein is the engineered, non-naturally occurring system of any one of embodiments 1-25, wherein the spacer sequence comprises a nucleotide sequence selected from the group consisting of SEQ ID NOs: 412-421, and wherein the spacer sequence is capable of hybridizing with the human APLNR gene. In embodiment 41 provided herein is the engineered, non-naturally occurring system of embodiment 40, wherein, when the system is delivered into a population of human cells ex vivo, the genomic sequence at the APLNR gene locus is edited in at least 1.5% of the cells. In embodiment 42 provided herein is the engineered, non-naturally occurring system of any one of embodiments 1-25, wherein the spacer sequence comprises a nucleotide sequence selected from the group consisting of SEQ ID NOs: 422-431, and wherein the spacer sequence is capable of hybridizing with the human BBS1 gene. In embodiment 43 provided herein is the engineered, non-naturally occurring system of embodiment 42, wherein, when the system is delivered into a population of human cells ex vivo, the genomic sequence at the BBS1 gene locus is edited in at least 1.5% of the cells. In embodiment 44 provided herein is the engineered, non-naturally occurring system of any one of embodiments 1-25, wherein the spacer sequence comprises a nucleotide sequence selected from the group consisting of SEQ ID NOs: 432-441, and wherein the spacer sequence is capable of hybridizing with the human CALR gene. In embodiment 45 provided herein is the engineered, non-naturally occurring system of embodiment 44, wherein, when the system is delivered into a population of human cells ex vivo, the genomic sequence at the CALR gene locus is edited in at least 1.5% of the cells. In embodiment 46 provided herein is the engineered, non-naturally occurring system of any one of embodiments 1-25, wherein the spacer sequence comprises a nucleotide sequence selected from the group consisting of SEQ ID NOs: 442-451, and wherein the spacer sequence is capable of hybridizing with the human CD247 gene. In embodiment 47 provided herein is the engineered, non-naturally occurring system of embodiment 46, wherein, when the system is delivered into a population of human cells ex vivo, the genomic sequence at the CD247 gene locus is edited in at least 1.5% of the cells. In embodiment 48 provided herein is the engineered, non-naturally occurring system of any one of embodiments 1-25, wherein the spacer sequence comprises a nucleotide sequence selected from the group consisting of SEQ ID NOs: 452-461, and wherein the spacer sequence is capable of hybridizing with the human CD3G gene. In embodiment 49 provided herein is the engineered, non-naturally occurring system of embodiment 48, wherein, when the system is delivered into a population of human cells ex vivo, the genomic sequence at the CD3G locus is edited in at least 1.5% of the cells. In embodiment 50 provided herein is the engineered, non-naturally occurring system of any one of embodiments 1-25, wherein the spacer sequence comprises a nucleotide sequence selected from the group consisting of SEQ ID NOs: 462-465, and wherein the spacer sequence is capable of hybridizing with the human CD52 gene. In embodiment 51 provided herein is the engineered, non-naturally occurring system of embodiment 50, wherein, when the system is delivered into a population of human cells ex vivo, the genomic sequence at the CD52 locus is edited in at least 1.5% of the cells. In embodiment 52 provided herein is the engineered, non-naturally occurring system of any one of embodiments 1-25, wherein the spacer sequence comprises a nucleotide sequence selected from the group consisting of SEQ ID NOs: 466-475, and wherein the spacer sequence is capable of hybridizing with the human CD58 gene. In embodiment 53 provided herein is the engineered, non-naturally occurring system of embodiment 52, wherein, when the system is delivered into a population of human cells ex vivo, the genomic sequence at the CD58 locus is edited in at least 1.5% of the cells. In embodiment 54 provided herein is the engineered, non-naturally occurring system of any one of embodiments 1-25, wherein the spacer sequence comprises a nucleotide sequence selected from the group consisting of SEQ ID NOs: 476-485, and wherein the spacer sequence is capable of hybridizing with the human COL17A1 gene. In embodiment 55 provided herein is the engineered, non-naturally occurring system of embodiment 54, wherein, when the system is delivered into a population of human cells ex vivo, the genomic sequence at the COL17A1 locus is edited in at least 1.5% of the cells. In embodiment 56 provided herein is the engineered, non-naturally occurring system of any one of embodiments 1-25, wherein the spacer sequence comprises a nucleotide sequence selected from the group consisting of SEQ ID NOs: 486-495, and wherein the spacer sequence is capable of hybridizing with the human DEFB134 gene. In embodiment 57 provided herein is the engineered, non-naturally occurring system of embodiment 56, wherein, when the system is delivered into a population of human cells ex vivo, the genomic sequence at the DEFB134 locus is edited in at least 1.5% of the cells. In embodiment 58 provided herein is the engineered, non-naturally occurring system of any one of embodiments 1-25, wherein the spacer sequence comprises a nucleotide sequence selected from the group consisting of SEQ ID NOs: 496-505, and wherein the spacer sequence is capable of hybridizing with the human ERAP1 gene. In embodiment 59 provided herein is the engineered, non-naturally occurring system of embodiment 58, wherein, when the system is delivered into a population of human cells ex vivo, the genomic sequence at the ERAP1 locus is edited in at least 1.5% of the cells. In embodiment 60 provided herein is the engineered, non-naturally occurring system of any one of embodiments 1-25, wherein the spacer sequence comprises a nucleotide sequence selected from the group consisting of SEQ ID NOs: 506-515, and wherein the spacer sequence is capable of hybridizing with the human ERAP2 gene. In embodiment 61 provided herein is the engineered, non-naturally occurring system of embodiment 60, wherein, when the system is delivered into a population of human cells ex vivo, the genomic sequence at the ERAP2 locus is edited in at least 1.5% of the cells. In embodiment 62 provided herein is the engineered, non-naturally occurring system of any one of embodiments 1-25, wherein the spacer sequence comprises a nucleotide sequence selected from the group consisting of SEQ ID NOs: 516-525, and wherein the spacer sequence is capable of hybridizing with the human IFNGR1 gene. In embodiment 63 provided herein is the engineered, non-naturally occurring system of embodiment 62, wherein, when the system is delivered into a population of human cells ex vivo, the genomic sequence at the IFNGR1 locus is edited in at least 1.5% of the cells. In embodiment 64 provided herein is the engineered, non-naturally occurring system of any one of embodiments 1-25, wherein the spacer sequence comprises a nucleotide sequence selected from the group consisting of SEQ ID NOs: 526-535, and wherein the spacer sequence is capable of hybridizing with the human IFNGR2 gene. In embodiment 65 provided herein is the engineered, non-naturally occurring system of embodiment 64, wherein, when the system is delivered into a population of human cells ex vivo, the genomic sequence at the IFNGR2 locus is edited in at least 1.5% of the cells. In embodiment 66 provided herein is the engineered, non-naturally occurring system of any one of embodiments 1-25, wherein the spacer sequence comprises a nucleotide sequence selected from the group consisting of SEQ ID NOs: 536-545, and wherein the spacer sequence is capable of hybridizing with the human JAK1 gene. In embodiment 67 provided herein is the engineered, non-naturally occurring system of embodiment 66, wherein, when the system is delivered into a population of human cells ex vivo, the genomic sequence at the JAK1 locus is edited in at least 1.5% of the cells. In embodiment 68 provided herein is the engineered, non-naturally occurring system of any one of embodiments 1-25, wherein the spacer sequence comprises a nucleotide sequence selected from the group consisting of SEQ ID NOs: 546-555, and wherein the spacer sequence is capable of hybridizing with the human JAK2 gene. In embodiment 69 provided herein is the engineered, non-naturally occurring system of embodiment 68, wherein, when the system is delivered into a population of human cells ex vivo, the genomic sequence at the JAK2 locus is edited in at least 1.5% of the cells. In embodiment 70 provided herein is the engineered, non-naturally occurring system of any one of embodiments 1-25, wherein the spacer sequence comprises a nucleotide sequence selected from the group consisting of SEQ ID NOs: 556-558, and wherein the spacer sequence is capable of hybridizing with the human mir-101-2 gene. In embodiment 71 provided herein is the engineered, non-naturally occurring system of embodiment 70, wherein, when the system is delivered into a population of human cells ex vivo, the genomic sequence at the mir-101-2 locus is edited in at least 1.5% of the cells. In embodiment 72 provided herein is the engineered, non-naturally occurring system of any one of embodiments 1-25, wherein the spacer sequence comprises a nucleotide sequence selected from the group consisting of SEQ ID NOs: 559-568, and wherein the spacer sequence is capable of hybridizing with the human MLANA gene. In embodiment 73 provided herein is the engineered, non-naturally occurring system of embodiment 72, wherein, when the system is delivered into a population of human cells ex vivo, the genomic sequence at the MLANA locus is edited in at least 1.5% of the cells. In embodiment 74 provided herein is the engineered, non-naturally occurring system of any one of embodiments 1-25, wherein the spacer sequence comprises a nucleotide sequence selected from the group consisting of SEQ ID NOs: 569-578, and wherein the spacer sequence is capable of hybridizing with the human PSMB5 gene. In embodiment 75 provided herein is the engineered, non-naturally occurring system of embodiment 74, wherein, when the system is delivered into a population of human cells ex vivo, the genomic sequence at the PSMB5 locus is edited in at least 1.5% of the cells. In embodiment 76 provided herein is the engineered, non-naturally occurring system of any one of embodiments 1-25, wherein the spacer sequence comprises a nucleotide sequence selected from the group consisting of SEQ ID NOs: 579-588, and wherein the spacer sequence is capable of hybridizing with the human PSMB8 gene. In embodiment 77 provided herein is the engineered, non-naturally occurring system of embodiment 76, wherein, when the system is delivered into a population of human cells ex vivo, the genomic sequence at the PSMB8 locus is edited in at least 1.5% of the cells. In embodiment 78 provided herein is the engineered, non-naturally occurring system of any one of embodiments 1-25, wherein the spacer sequence comprises a nucleotide sequence selected from the group consisting of SEQ ID NOs: 589-598, and wherein the spacer sequence is capable of hybridizing with the human PSMB9 gene. In embodiment 79 provided herein is the engineered, non-naturally occurring system of embodiment 78, wherein, when the system is delivered into a population of human cells ex vivo, the genomic sequence at the PSMB9 locus is edited in at least 1.5% of the cells. In embodiment 80 provided herein is the engineered, non-naturally occurring system of any one of embodiments 1-25, wherein the spacer sequence comprises a nucleotide sequence selected from the group consisting of SEQ ID NOs: 599-608, and wherein the spacer sequence is capable of hybridizing with the human PTCD2 gene. In embodiment 81 provided herein is the engineered, non-naturally occurring system of embodiment 80, wherein, when the system is delivered into a population of human cells ex vivo, the genomic sequence at the PTCD2 locus is edited in at least 1.5% of the cells. In embodiment 82 provided herein is the engineered, non-naturally occurring system of any one of embodiments 1-25, wherein the spacer sequence comprises a nucleotide sequence selected from the group consisting of SEQ ID NOs: 609-618, and wherein the spacer sequence is capable of hybridizing with the human RFX5 gene. In embodiment 83 provided herein is the engineered, non-naturally occurring system of embodiment 82, wherein, when the system is delivered into a population of human cells ex vivo, the genomic sequence at the RFX5 locus is edited in at least 1.5% of the cells. In embodiment 84 provided herein is the engineered, non-naturally occurring system of any one of embodiments 1-25, wherein the spacer sequence comprises a nucleotide sequence selected from the group consisting of SEQ ID NOs: 619-628, and wherein the spacer sequence is capable of hybridizing with the human RFXANK gene. In embodiment 85 provided herein is the engineered, non-naturally occurring system of embodiment 84, wherein, when the system is delivered into a population of human cells ex vivo, the genomic sequence at the RFXANK locus is edited in at least 1.5% of the cells. In embodiment 86 provided herein is the engineered, non-naturally occurring system of any one of embodiments 1-25, wherein the spacer sequence comprises a nucleotide sequence selected from the group consisting of SEQ ID NOs: 629-638, and wherein the spacer sequence is capable of hybridizing with the human RFXAP gene. In embodiment 87 provided herein is the engineered, non-naturally occurring system of embodiment 86, wherein, when the system is delivered into a population of human cells ex vivo, the genomic sequence at the RFXAP locus is edited in at least 1.5% of the cells. In embodiment 88 provided herein is the engineered, non-naturally occurring system of any one of embodiments 1-25, wherein the spacer sequence comprises a nucleotide sequence selected from the group consisting of SEQ ID NOs: 639-648, and wherein the spacer sequence is capable of hybridizing with the human RPL23 gene. In embodiment 89 provided herein is the engineered, non-naturally occurring system of embodiment 88, wherein, when the system is delivered into a population of human cells ex vivo, the genomic sequence at the RPL23 locus is edited in at least 1.5% of the cells. In embodiment 90 provided herein is the engineered, non-naturally occurring system of any one of embodiments 1-25, wherein the spacer sequence comprises a nucleotide sequence selected from the group consisting of SEQ ID NOs: 649-654, and wherein the spacer sequence is capable of hybridizing with the human SOX10 gene. In embodiment 91 provided herein is the engineered, non-naturally occurring system of embodiment 90, wherein, when the system is delivered into a population of human cells ex vivo, the genomic sequence at the SOX10 locus is edited in at least 1.5% of the cells. In embodiment 92 provided herein is the engineered, non-naturally occurring system of any one of embodiments 1-25, wherein the spacer sequence comprises a nucleotide sequence selected from the group consisting of SEQ ID NOs: 655-665, and wherein the spacer sequence is capable of hybridizing with the human SRP54 gene. In embodiment 93 provided herein is the engineered, non-naturally occurring system of embodiment 92, wherein, when the system is delivered into a population of human cells ex vivo, the genomic sequence at the SRP54 locus is edited in at least 1.5% of the cells. In embodiment 94 provided herein is the engineered, non-naturally occurring system of any one of embodiments 1-25, wherein the spacer sequence comprises a nucleotide sequence selected from the group consisting of SEQ ID NOs: 666-675, and wherein the spacer sequence is capable of hybridizing with the human STAT1 gene. In embodiment 95 provided herein is the engineered, non-naturally occurring system of embodiment 94, wherein, when the system is delivered into a population of human cells ex vivo, the genomic sequence at the STAT1 locus is edited in at least 1.5% of the cells. In embodiment 96 provided herein is the engineered, non-naturally occurring system of any one of embodiments 1-25, wherein the spacer sequence comprises a nucleotide sequence selected from the group consisting of SEQ ID NOs: 676-685, and wherein the spacer sequence is capable of hybridizing with the human Tap1 gene. In embodiment 97 provided herein is the engineered, non-naturally occurring system of embodiment 96, wherein, when the system is delivered into a population of human cells ex vivo, the genomic sequence at the Tap1 locus is edited in at least 1.5% of the cells. In embodiment 98 provided herein is the engineered, non-naturally occurring system of any one of embodiments 1-25, wherein the spacer sequence comprises a nucleotide sequence selected from the group consisting of SEQ ID NOs: 686-695, and wherein the spacer sequence is capable of hybridizing with the human Tap2 gene. In embodiment 99 provided herein is the engineered, non-naturally occurring system of embodiment 98, wherein, when the system is delivered into a population of human cells ex vivo, the genomic sequence at the Tap2 locus is edited in at least 1.5% of the cells. In embodiment 100 provided herein is the engineered, non-naturally occurring system of any one of embodiments 1-25, wherein the spacer sequence comprises a nucleotide sequence selected from the group consisting of SEQ ID NOs: 696-705, and wherein the spacer sequence is capable of hybridizing with the human TAPBP gene. In embodiment 101 provided herein is the engineered, non-naturally occurring system of embodiment 100, wherein, when the system is delivered into a population of human cells ex vivo, the genomic sequence at the TAPBP locus is edited in at least 1.5% of the cells. In embodiment 102 provided herein is the engineered, non-naturally occurring system of any one of embodiments 1-25, wherein the spacer sequence comprises a nucleotide sequence selected from the group consisting of SEQ ID NOs: 706-715, and wherein the spacer sequence is capable of hybridizing with the human TFW1 gene. In embodiment 103 provided herein is the engineered, non-naturally occurring system of embodiment 102, wherein, when the system is delivered into a population of human cells ex vivo, the genomic sequence at the TFW1 locus is edited in at least 1.5% of the cells. In embodiment 104 provided herein is the engineered, non-naturally occurring system of any one of embodiments 1-25, wherein the spacer sequence comprises a nucleotide sequence selected from the group consisting of SEQ ID NOs: 716-725, and wherein the spacer sequence is capable of hybridizing with the human CD3D gene. In embodiment 105 provided herein is the engineered, non-naturally occurring system of embodiment 104, wherein, when the system is delivered into a population of human cells ex vivo, the genomic sequence at the CD3D locus is edited in at least 1.5% of the cells. In embodiment 106 provided herein is the engineered, non-naturally occurring system of any one of embodiments 1-25, wherein the spacer sequence comprises a nucleotide sequence selected from the group consisting of SEQ ID NOs: 726-744, and wherein the spacer sequence is capable of hybridizing with the human NLRC5 gene. In embodiment 107 provided herein is the engineered, non-naturally occurring system of embodiment 106, wherein, when the system is delivered into a population of human cells ex vivo, the genomic sequence at the NLRC5 locus is edited in at least 1.5% of the cells. In embodiment 108 provided herein is the engineered, non-naturally occurring system of any one of embodiments 20-107, wherein genomic mutations are detected in no more than 2% of the cells at any off-target loci by CIRCLE-Seq. In embodiment 109 provided herein is the engineered, non-naturally occurring system of embodiment 108, wherein genomic mutations are detected in no more than 1% of the cells at any off-target loci by CIRCLE-Seq. In embodiment 110 provided herein is a human cell comprising the engineered, non-naturally occurring system of any one of embodiments 20-109. In embodiment 111 provided herein is a composition comprising the guide nucleic acid of any one of embodiments 1-19, the engineered, non-naturally occurring system of any one of embodiments 20-109, or the human cell of embodiment 110. In embodiment 112 provided herein is a method of cleaving a target DNA comprising the sequence of a preselected target gene or a portion thereof, the method comprising contacting the target DNA with the engineered, non-naturally occurring system of any one of embodiments 20-109, thereby resulting in cleavage of the target DNA. In embodiment 113 provided herein is the method of embodiment 112, wherein the contacting occurs in vitro. In embodiment 114 provided herein is the method of embodiment 112, wherein the contacting occurs in a cell ex vivo. In embodiment 115 provided herein is the method of embodiment 114, wherein the target DNA is genomic DNA of the cell. In embodiment 116 provided herein is a method of editing human genomic sequence at a preselected target gene locus, the method comprising delivering the engineered, non-naturally occurring system of any one of embodiments 20-109 into a human cell, thereby resulting in editing of the genomic sequence at the target gene locus in the human cell. In embodiment 117 provided herein is the method of any one of embodiments 114-116, wherein the cell is an immune cell. In embodiment 118 provided herein is the method of embodiment 117, wherein the immune cell is a T lymphocyte. In embodiment 119 provided herein is the method of embodiment 116, the method comprising delivering the engineered, non-naturally occurring system of any one of embodiments 20-109 into a population of human cells, thereby resulting in editing of the genomic sequence at the target gene locus in at least a portion of the human cells. In embodiment 120 provided herein is the method of embodiment 119, wherein the population of human cells comprises human immune cells. In embodiment 121 provided herein is the method of embodiment 119 or 120, wherein the population of human cells is an isolated population of human immune cells. In embodiment 122 provided herein is the method of embodiment 120 or 121, wherein the immune cells are T lymphocytes. In embodiment 123 provided herein is the method of any one of embodiments 119-122, wherein editing of the genomic sequence at the target gene locus results lowered expression of the target gene. In embodiment 124 provided herein is the method of embodiment 123, wherein the edited cell demonstrates less than 80% of the expression of the endogenous gene relative to a corresponding unmodified or parental cell. In embodiment 125 provided herein is the method of embodiment 123, wherein the edited cell demonstrates less than 70% of the expression of the endogenous gene relative to a corresponding unmodified or parental cell. In embodiment 126 provided herein is the method of embodiment 123, wherein the edited cell demonstrates less than 60% of the expression of the endogenous gene relative to a corresponding unmodified or parental cell. In embodiment 127 provided herein is the method of embodiment 123, wherein the edited cell demonstrates less than 50% of the expression of the endogenous gene relative to a corresponding unmodified or parental cell. In embodiment 128 provided herein is the method of any one of embodiments 116-127, wherein the engineered, non-naturally occurring system is delivered into the cell(s) as a pre-formed RNP complex. In embodiment 129 provided herein is the method of embodiment 128, wherein the pre-formed RNP complex is delivered into the cell(s) by electroporation. In embodiment 130 provided herein is the method of any one of embodiments 116-129, wherein the target gene is human CSF2 gene, and wherein the spacer sequence comprises a nucleotide sequence selected from the group consisting of SEQ ID NOs: 201-253. In embodiment 131 provided herein is the method of any one of embodiments 119-130, wherein the genomic sequence at the CSF2 gene locus is edited in at least 1.5% of the human cells. In embodiment 132 provided herein is the method of any one of embodiments 116-129, wherein the target gene is human CD40LG gene, and wherein the spacer sequence comprises a nucleotide sequence selected from the group consisting of SEQ ID NOs: 254-313. In embodiment 133 provided herein is the method of any one of embodiments 119-129 and 132, wherein the genomic sequence at the CD40LG gene locus is edited in at least 1.5% of the human cells. In embodiment 134 provided herein is the method of any one of embodiments 116-129, wherein the target gene is human TRBC1 gene, and wherein the spacer sequence comprises a nucleotide sequence selected from the group consisting of SEQ ID NOs: 314-319 and 329-332. In embodiment 135 provided herein is the method of any one of embodiments 119-129 and 134, wherein the genomic sequence at the TRBC1 gene locus is edited in at least 1.5% of the human cells. In embodiment 136 provided herein is the method of any one of embodiments 116-129, wherein the target gene is human TRBC2 gene, and wherein the spacer sequence comprises a nucleotide sequence selected from the group consisting of SEQ ID NOs: 320-328 and 329-332. In embodiment 137 provided herein is the method of any one of embodiments 119-129 and 136, wherein the genomic sequence at the TRBC2 gene locus is edited in at least 1.5% of the human cells. In embodiment 138 provided herein is the method of any one of embodiments 116-129, wherein the target gene is both the human TRBC1 gene and the human TRBC2 gene, and wherein the spacer sequence comprises a nucleotide sequence selected from the group consisting of SEQ ID NOs: 329-332. In embodiment 139 provided herein is the method of any one of embodiments 119-129 and 138, wherein the genomic sequence at both the human TRBC1 gene and the human TRBC2 gene locus is edited in at least 1.5% of the human cells. In embodiment 140 provided herein is the method of any one of embodiments 116-129, wherein the target gene is human CD3E gene, and wherein the spacer sequence comprises a nucleotide sequence selected from the group consisting of SEQ ID NOs: 333-374. In embodiment 141 provided herein is the method of any one of embodiments 119-129 and 140, wherein the genomic sequence at the CD3E gene locus is edited in at least 1.5% of the human cells. In embodiment 142 provided herein is the method of any one of embodiments 116-129, wherein the target gene is human CD38 gene, and wherein the spacer sequence comprises a nucleotide sequence selected from the group consisting of SEQ ID NOs: 375-411. In embodiment 143 provided herein is the method of any one of embodiments 119-129 and 142, wherein the genomic sequence at the CD38 gene locus is edited in at least 1.5% of the human cells. In embodiment 144 provided herein is the method of any one of embodiments 116-129, wherein the target gene is human APLNR gene, and wherein the spacer sequence comprises a nucleotide sequence selected from the group consisting of SEQ ID NOs: 412-421. In embodiment 145 provided herein is the method of any one of embodiments 119-129 and 144, wherein the genomic sequence at the APLNR gene locus is edited in at least 1.5% of the human cells. In embodiment 146 provided herein is the method of any one of embodiments 116-129, wherein the target gene is human BBS1 gene, and wherein the spacer sequence comprises a nucleotide sequence selected from the group consisting of SEQ ID NOs: 422-431. In embodiment 147 provided herein is the method of any one of embodiments 119-129 and 146, wherein the genomic sequence at the BBS1 gene locus is edited in at least 1.5% of the human cells. In embodiment 148 provided herein is the method of any one of embodiments 116-129, wherein the target gene is human CALR gene, and wherein the spacer sequence comprises a nucleotide sequence selected from the group consisting of SEQ ID NOs: 432-441. In embodiment 149 provided herein is the method of any one of embodiments 119-129 and 148, wherein the genomic sequence at the CD247 gene locus is edited in at least 1.5% of the human cells. In embodiment 150 provided herein is the method of any one of embodiments 116-129, wherein the target gene is human CALR gene, and wherein the spacer sequence comprises a nucleotide sequence selected from the group consisting of SEQ ID NOs: 442-451. In embodiment 151 provided herein is the method of any one of embodiments 119-129 and 150, wherein the genomic sequence at the CD247 gene locus is edited in at least 1.5% of the human cells. In embodiment 152 provided herein is the method of any one of embodiments 116-129, wherein the target gene is human CD3G gene, and wherein the spacer sequence comprises a nucleotide sequence selected from the group consisting of SEQ ID NOs: 452-461. In embodiment 153 provided herein is the method of any one of embodiments 119-129 and 152, wherein the genomic sequence at the CD3G gene locus is edited in at least 1.5% of the human cells. In embodiment 154 provided herein is the method of any one of embodiments 116-129, wherein the target gene is human CD52 gene, and wherein the spacer sequence comprises a nucleotide sequence selected from the group consisting of SEQ ID NOs: 462-465. In embodiment 155 provided herein is the method of any one of embodiments 119-129 and 154, wherein the genomic sequence at the CD52 gene locus is edited in at least 1.5% of the human cells. In embodiment 156 provided herein is the method of any one of embodiments 116-129, wherein the target gene is human CD58 gene, and wherein the spacer sequence comprises a nucleotide sequence selected from the group consisting of SEQ ID NOs: 466-475. In embodiment 157 provided herein is the method of any one of embodiments 119-129 and 156, wherein the genomic sequence at the CD58 gene locus is edited in at least 1.5% of the human cells. In embodiment 158 provided herein is the method of any one of embodiments 116-129, wherein the target gene is human COL17A1 gene, and wherein the spacer sequence comprises a nucleotide sequence selected from the group consisting of SEQ ID NOs: 476-485. In embodiment 159 provided herein is the method of any one of embodiments 119-129 and 158, wherein the genomic sequence at the COL17A1 gene locus is edited in at least 1.5% of the human cells. In embodiment 160 provided herein is the method of any one of embodiments 116-129, wherein the target gene is human DEFB134 gene, and wherein the spacer sequence comprises a nucleotide sequence selected from the group consisting of SEQ ID NOs: 486-495. In embodiment 161 provided herein is the method of any one of embodiments 119-129 and 160, wherein the genomic sequence at the DEFB134 gene locus is edited in at least 1.5% of the human cells. In embodiment 162 provided herein is the method of any one of embodiments 116-129, wherein the target gene is human ERAP1 gene, and wherein the spacer sequence comprises a nucleotide sequence selected from the group consisting of SEQ ID NOs: 496-505. In embodiment 163 provided herein is the method of any one of embodiments 119-129 and 162, wherein the genomic sequence at the ERAP1 gene locus is edited in at least 1.5% of the human cells. In embodiment 164 provided herein is the method of any one of embodiments 116-129, wherein the target gene is human ERAP2 gene, and wherein the spacer sequence comprises a nucleotide sequence selected from the group consisting of SEQ ID NOs: 506-515. In embodiment 165 provided herein is the method of any one of embodiments 119-129 and 164, wherein the genomic sequence at the ERAP2 gene locus is edited in at least 1.5% of the human cells. In embodiment 166 provided herein is the method of any one of embodiments 116-129, wherein the target gene is human IFNGR1 gene, and wherein the spacer sequence comprises a nucleotide sequence selected from the group consisting of SEQ ID NOs: 516-525. In embodiment 167 provided herein is the method of any one of embodiments 119-129 and 166, wherein the genomic sequence at the IFNGR1 gene locus is edited in at least 1.5% of the human cells. In embodiment 168 provided herein is the method of any one of embodiments 116-129, wherein the target gene is human IFNGR2 gene, and wherein the spacer sequence comprises a nucleotide sequence selected from the group consisting of SEQ ID NOs: 526-535. In embodiment 169 provided herein is the method of any one of embodiments 119-129 and 168, wherein the genomic sequence at the IFNGR2 gene locus is edited in at least 1.5% of the human cells. In embodiment 170 provided herein is the method of any one of embodiments 116-129, wherein the target gene is human JAK1 gene, and wherein the spacer sequence comprises a nucleotide sequence selected from the group consisting of SEQ ID NOs: 536-545. In embodiment 171 provided herein is the method of any one of embodiments 119-129 and 170, wherein the genomic sequence at the JAK1 gene locus is edited in at least 1.5% of the human cells. In embodiment 172 provided herein is the method of any one of embodiments 116-129, wherein the target gene is human JAK2 gene, and wherein the spacer sequence comprises a nucleotide sequence selected from the group consisting of SEQ ID NOs: 546-555. In embodiment 173 provided herein is the method of any one of embodiments 119-129 and 172, wherein the genomic sequence at the JAK2 gene locus is edited in at least 1.5% of the human cells. In embodiment 174 provided herein is the method of any one of embodiments 116-129, wherein the target gene is human mir-101-2 gene, and wherein the spacer sequence comprises a nucleotide sequence selected from the group consisting of SEQ ID NOs: 556-558. In embodiment 175 provided herein is the method of any one of embodiments 119-129 and 174, wherein the genomic sequence at the mir-101-2 gene locus is edited in at least 1.5% of the human cells. In embodiment 176 provided herein is the method of any one of embodiments 116-129, wherein the target gene is human MLANA gene, and wherein the spacer sequence comprises a nucleotide sequence selected from the group consisting of SEQ ID NOs: 559-568. In embodiment 177 provided herein is the method of any one of embodiments 119-129 and 176, wherein the genomic sequence at the PSMB5 gene locus is edited in at least 1.5% of the human cells. In embodiment 178 provided herein is the method of any one of embodiments 116-129, wherein the target gene is human PSMB5 gene, and wherein the spacer sequence comprises a nucleotide sequence selected from the group consisting of SEQ ID NOs: 569-578. In embodiment 179 provided herein is the method of any one of embodiments 119-129 and 178, wherein the genomic sequence at the PSMB5 gene locus is edited in at least 1.5% of the human cells. In embodiment 180 provided herein is the method of any one of embodiments 116-129, wherein the target gene is human PSMB8 gene, and wherein the spacer sequence comprises a nucleotide sequence selected from the group consisting of SEQ ID NOs: 579-588. In embodiment 181 provided herein is the method of any one of embodiments 119-129 and 180, wherein the genomic sequence at the PSMB8 gene locus is edited in at least 1.5% of the human cells. In embodiment 182 provided herein is the method of any one of embodiments 116-129, wherein the target gene is human PSMB9 gene, and wherein the spacer sequence comprises a nucleotide sequence selected from the group consisting of SEQ ID NOs: 589-598. In embodiment 183 provided herein is the method of any one of embodiments 119-129 and 182, wherein the genomic sequence at the PSMB9 gene locus is edited in at least 1.5% of the human cells. In embodiment 184 provided herein is the method of any one of embodiments 116-129, wherein the target gene is human PTCD2 gene, and wherein the spacer sequence comprises a nucleotide sequence selected from the group consisting of SEQ ID NOs: 599-608. In embodiment 185 provided herein is the method of any one of embodiments 119-129 and 184, wherein the genomic sequence at the PTCD2 gene locus is edited in at least 1.5% of the human cells. In embodiment 186 provided herein is the method of any one of embodiments 116-129, wherein the target gene is human RFX5 gene, and wherein the spacer sequence comprises a nucleotide sequence selected from the group consisting of SEQ ID NOs: 609-618. In embodiment 187 provided herein is the method of any one of embodiments 119-129 and 186, wherein the genomic sequence at the RFX5 gene locus is edited in at least 1.5% of the human cells. In embodiment 188 provided herein is the method of any one of embodiments 116-129, wherein the target gene is human RFXANK gene, and wherein the spacer sequence comprises a nucleotide sequence selected from the group consisting of SEQ ID NOs: 619-628. In embodiment 189 provided herein is the method of any one of embodiments 119-129 and 188, wherein the genomic sequence at the RFXANK gene locus is edited in at least 1.5% of the human cells. In embodiment 190 provided herein is the method of any one of embodiments 116-129, wherein the target gene is human RFXAP gene, and wherein the spacer sequence comprises a nucleotide sequence selected from the group consisting of SEQ ID NOs: 629-638. In embodiment 191 provided herein is the method of any one of embodiments 119-129 and 190, wherein the genomic sequence at the RFXAP gene locus is edited in at least 1.5% of the human cells. In embodiment 192 provided herein is the method of any one of embodiments 116-129, wherein the target gene is human RPL23 gene, and wherein the spacer sequence comprises a nucleotide sequence selected from the group consisting of SEQ ID NOs: 639-648. In embodiment 193 provided herein is the method of any one of embodiments 119-129 and 192, wherein the genomic sequence at the RPL23 gene locus is edited in at least 1.5% of the human cells. In embodiment 194 provided herein is the method of any one of embodiments 116-129, wherein the target gene is human SOX10 gene, and wherein the spacer sequence comprises a nucleotide sequence selected from the group consisting of SEQ ID NOs: 649-654. In embodiment 195 provided herein is the method of any one of embodiments 119-129 and 194, wherein the genomic sequence at the SOX10 gene locus is edited in at least 1.5% of the human cells. In embodiment 196 provided herein is the method of any one of embodiments 116-129, wherein the target gene is human SRP54 gene, and wherein the spacer sequence comprises a nucleotide sequence selected from the group consisting of SEQ ID NOs: 655-665. In embodiment 197 provided herein is the method of any one of embodiments 119-129 and 196, wherein the genomic sequence at the SRP54 gene locus is edited in at least 1.5% of the human cells. In embodiment 198 provided herein is the method of any one of embodiments 116-129, wherein the target gene is human STAT1 gene, and wherein the spacer sequence comprises a nucleotide sequence selected from the group consisting of SEQ ID NOs: 666-675. In embodiment 199 provided herein is the method of any one of embodiments 119-129 and 198, wherein the genomic sequence at the STAT1 gene locus is edited in at least 1.5% of the human cells. In embodiment 200 provided herein is the method of any one of embodiments 116-129, wherein the target gene is human Tap1 gene, and wherein the spacer sequence comprises a nucleotide sequence selected from the group consisting of SEQ ID NOs: 676-685. In embodiment 201 provided herein is the method of any one of embodiments 119-129 and 200, wherein the genomic sequence at the Tap1 gene locus is edited in at least 1.5% of the human cells. In embodiment 202 provided herein is the method of any one of embodiments 116-129, wherein the target gene is human TAP2 gene, and wherein the spacer sequence comprises a nucleotide sequence selected from the group consisting of SEQ ID NOs: 686-695. In embodiment 203 provided herein is the method of any one of embodiments 119-129 and 202, wherein the genomic sequence at the TAP2 gene locus is edited in at least 1.5% of the human cells. In embodiment 204 provided herein is the method of any one of embodiments 116-129, wherein the target gene is human TAPBP gene, and wherein the spacer sequence comprises a nucleotide sequence selected from the group consisting of SEQ ID NOs: 696-705. In embodiment 205 provided herein is the method of any one of embodiments 119-129 and 204, wherein the genomic sequence at the TAPBP gene locus is edited in at least 1.5% of the human cells. In embodiment 206 provided herein is the method of any one of embodiments 116-129, wherein the target gene is human TWF1 gene, and wherein the spacer sequence comprises a nucleotide sequence selected from the group consisting of SEQ ID NOs: 706-715. In embodiment 207 provided herein is the method of any one of embodiments 119-129 and 206, wherein the genomic sequence at the TWF1 gene locus is edited in at least 1.5% of the human cells. In embodiment 208 provided herein is the method of any one of embodiments 116-129, wherein the target gene is human CD3D gene, and wherein the spacer sequence comprises a nucleotide sequence selected from the group consisting of SEQ ID NOs: 716-725. In embodiment 209 provided herein is the method of any one of embodiments 119-129 and 208, wherein the genomic sequence at the CD3D gene locus is edited in at least 1.5% of the human cells. In embodiment 210 provided herein is the method of any one of embodiments 116-129, wherein the target gene is human NLRC2 gene, and wherein the spacer sequence comprises a nucleotide sequence selected from the group consisting of SEQ ID NOs: 726-744. In embodiment 211 provided herein is the method of any one of embodiments 119-129 and 210, wherein the genomic sequence at the NLRC2 gene locus is edited in at least 1.5% of the human cells. In embodiment 212 provided herein is the method of any one of embodiments 119-211, wherein genomic mutations are detected in no more than 2% of the cells at any off-target loci by CIRCLE-Seq. In embodiment 213 provided herein is the method of any one of embodiments 119-211, wherein genomic mutations are detected in no more than 1% of the cells at any off-target loci by CIRCLE-Seq.

### VII. EXAMPLES

[0326] The following Examples are merely illustrative and are not intended to limit the scope or content of the invention in any way.

### Example 1. Cleavage of Genomic DNA by Single Guide MAD7 CRISPR-Cas Systems

[0327] MAD7 is a type V-A Cas protein that has endonuclease activity when complexed with a single guide RNA, also known as a crRNA in a type V-A system (see, U.S. Pat. No. 9,982,279). This example describes cleavage of the genomic DNA of Jurkat cells using MAD7 in complex with single guide nucleic acids targeting human CSF2, CD40LG, TRBC1, TRBC2, TRBC1_2, CD3E, CD38, DHODH, MVD, PLK1, TUBB, or U6 gene.

[0328] Briefly, Jurkat cells were grown in RPMI 1640 medium (Thermo Fisher Scientific, A1049101) supplemented with 10% fetus bovine serum at 37° C. in a 5% CO₂ environment, and split every 2-3 days to a density of 100,000 cells/mL. MAD7 protein, which contained a nucleoplasmin NLS at the C-terminus, was expressed in E. coli and purified by fast protein liquid chromatography (FPLC). RNP complexes were prepared by incubating 100 pmol MAD7 protein with 100 pmol chemically synthesized single guide RNA for 10 minutes at room temperature. The RNPs were mixed with 200,000 Jurkat cells in a final volume of 25 μL. Electroporation was carried out on a 4D-Nucleofector (Lonza) using program CA-137. Following electroporation, the cells were cultured for three days.

[0329] Genomic DNA of the cells was extracted using the Quick Extract DNA extraction solution 1.0 (Epicentre). The genes were amplified from the genomic DNA samples in a PCR reaction with primers with or without overhang adaptors and processed using the Nextera XT Index Kit v2 Set A (Illumina, FC-131-2001) or the KAPA HyperPlus kit (Roche, cat. no. KK8514), respectively. The final PCR products were analyzed by next-generation sequencing, and the data were analyzed with the AmpliCan package (see, Labun et al. (2019), Accurate analysis of genuine CRISPR editing events with ampliCan, Genome Res., electronically published in advance). Editing efficiency was determined by the number of edited reads relative to the total number of reads obtained under each condition.

[0330] The nucleotide sequence of each single guide RNA used in this example consisted of, from 5′ to 3′, UAAUUUCUACUCUUGUAGAU (SEQ ID NO: 50) and a spacer sequence. In SEQ ID NO: 50, the modulator stem sequence (UCUAC) and the targeter stem sequence (GUAGA) are underlined. The editing efficiency of each single guide RNA was measured as the percentage of cells having one or more insertion or deletion at the target site (% indel). The spacer sequences tested for targeting human CSF2, CD40LG, TRBC1, TRBC2, TRBC1_2, CD3E, CD38, DHODH, MVD, PLK1, TUBB, or U6 gene and the editing efficiency of each single guide RNA are shown in Tables 14-20.

TABLE 14
Selected Spacer Sequences
Targeting Human CSF2 Genes

| | | SEQ | 8 | % | INDEL |
|---|---|---|---|---|---|
| | Spacer | ID | INDEL | INDEL | 1 |
| crRNA | Sequence | NO | control | rep1 | rep2 |
| gCSF2_ | TGAGATGACT | 201 | 0.005 | 1.5 | 0.16 |
| 001 | TCTACTGTTT | | | | |
| | C | | | | |
| gCSF2_ | CCTTTTCTAC | 202 | 0.006 | 0.0077 | 0.038 |
| 002 | AGAATGAAAC | | | | |
| | A | | | | |
| gCSF2_ | CTTTTCTACA | 203 | 0.003 | 22.4 | 6 |
| 003 | GAATGAAACA | | | | |
| | G | | | | |
| gCSF2_ | CTACAGAATG | 204 | 0.003 | 0.019 | 0.018 |
| 004 | AAACAGTAGA | | | | |
| | A | | | | |
| gCSF2_ | TACAGAATGA | 205 | 0.003 | 29 | 26 |
| 005 | AACAGTAGAA | | | | |
| | G | | | | |
| gCSF2_ | CCACAGGAGC | 206 | 0.007 | 2.4 | 0.021 |
| 006 | CGACCTGCCT | | | | |
| | A | | | | |
| gCSF2_ | CACAGGAGCC | 207 | 0.007 | 27 | 34.7 |
| 007 | GACCTGCCTA | | | | |
| | C | | | | |
| gCSF2_ | ttatttttct | 208 | 0.91 | 0.12 | 0.78 |
| 008 | ttttttAAAG | | | | |
| | G | | | | |
| gCSF2_ | tatttttctt | 209 | 0.91 | 0.14 | 0.10 |
| 009 | tttttAAAGG | | | | |
| | A | | | | |
| gCSF2_ | atttttcttt | 210 | 0.91 | 0.15 | 0.15 |
| 010 | ttttAAAGGA | | | | |
| | A | | | | |
| gCSF2_ | tttttctttt | 211 | 0.91 | 0 | 0.16 |
| 011 | tttAAAGGAA | | | | |
| | A | | | | |
| gCSF2_ | tctttttttA | 212 | 0.024 | 0.046 | 0.051 |
| 012 | AAGGAAACTT | | | | |
| | C | | | | |
| gCSF2_ | ctttttttAA | 213 | 0.022 | 0.038 | 0.035 |
| 013 | AGGAAACTTC | | | | |
| | C | | | | |
| gCSF2_ | tttttttAAA | 214 | 0.011 | 0.011 | 0.016 |
| 014 | GGAAACTTCC | | | | |
| | T | | | | |
| gCSF2_ | tttAAAGGAA | 215 | 0.004 | 0.035 | 0.005 |
| 015 | ACTTCCTGTG | | | | |
| | C | | | | |
| gCSF2_ | ttAAAGGAAA | 216 | 0.004 | 0.28 | 0.005 |
| 016 | CTTCCTGTGC | | | | |
| | A | | | | |
| gCSF2_ | tAAAGGAAAC | 217 | 0.004 | 0.019 | 0.88 |
| 017 | TTCCTGTGCA | | | | |
| | A | | | | |
| gCSF2_ | AAAGGTGATA | 218 | 0.01 | 0.01 | 0.01 |
| 018 | ATCTGGGTTG | | | | |
| | C | | | | |
| gCSF2_ | AAAGGAAACT | 219 | 0.004 | 0.0078 | 0.01 |
| 019 | TCCTGTGCAA | | | | |
| | C | | | | |
| gCSF2_ | AAGGAAACTT | 220 | 0.003 | 7 | 6.6 |
| 020 | CCTGTGCAAC | | | | |
| | C | | | | |
| gCSF2_ | AAACTTTCAA | 221 | 0.008 | 0.007 | 0.014 |
| 021 | AGGTGATAAT | | | | |
| | C | | | | |
| gCSF2_ | AAAGTTTCAA | 222 | 0.017 | 0.016 | 0.029 |
| 022 | AGAGAACCTG | | | | |
| | A | | | | |
| gCSF2_ | AAAGAGAACC | 223 | 0.006 | 0.007 | 3.5 |
| 023 | TGAAGGACTT | | | | |
| | T | | | | |
| gCSF2_ | TGCTTGTCAT | 224 | 0.029 | 7.9 | 9.4 |
| 024 | CCCCTTTGAC | | | | |
| | T | | | | |
| gCSF2_ | ACTGCTGGGA | 225 | 0.005 | 0.099 | 1.5 |
| 025 | GCCAGTCCAG | | | | |
| | G | | | | |

TABLE 15
Selected Spacer Sequences
Targeting Human CD40LG Genes

| | | SEQ | % | % | 8 |
|---|---|---|---|---|---|
| | Spacer | ID | INDEL_ | INDEL_ | INDEL_ |
| crRNA | Sequence | NO | control | rep1 | rep2 |
| gCD40LG_ | GTTGTATGTT | 254 | 0.009 | 20.6 | 9.7 |
| 001 | TCGATCATGC | | | | |
| | T | | | | |
| gCD40LG_ | AACTTTAACA | 255 | 0.01 | 0.004 | 3.3 |
| 002 | CAGCATGATC | | | | |
| | G | | | | |
| gCD40LG_ | ACACAGCATG | 256 | 0.017 | 1.06 | 1.5 |
| 003 | ATCGAAACAT | | | | |
| | A | | | | |
| gCD40LG_ | ATGCTGATGG | 257 | 0.012 | 6.6 | 10.9 |
| 004 | GCAGTCCAGT | | | | |
| | G | | | | |
| gCD40LG_ | CATGCTGATG | 258 | 0.012 | 0.007 | 0.45 |
| 005 | GGCAGTCCAG | | | | |
| | T | | | | |
| gCD40LG_ | TATGTATTTA | 259 | 0.045 | 0.06 | 0.05 |
| 006 | CTTACTGTTT | | | | |
| | T | | | | |
| gCD40LG_ | ATGTATTTAC | 260 | 0.045 | 0.05 | 0.05 |
| 007 | TTACTGTTTT | | | | |
| | T | | | | |
| gCD40LG_ | TGTATTTACT | 261 | 0.049 | 0.059 | 0.02 |
| 008 | TACTGTTTTT | | | | |
| | C | | | | |
| gCD40LG_ | CTTACTGTTT | 262 | 0.05 | 0.029 | 0.02 |
| 009 | TTCTTATCAC | | | | |
| | C | | | | |
| gCD40LG_ | TCTTATCACC | 263 | 0.025 | 0.029 | 0.06 |
| 010 | CAGATGATTG | | | | |
| | G | | | | |
| gCD40LG_ | CTTATCACCC | 264 | 0.099 | 0.034 | 0.14 |
| 011 | AGATGATTGG | | | | |
| | G | | | | |
| gCD40LG_ | TTATCACCCA | 265 | 0.10 | 0.37 | 0.11 |
| 012 | GATGATTGGG | | | | |
| | T | | | | |
| gCD40LG_ | TGCTGTGTAT | 266 | 0.02 | 0.019 | 0.014 |
| 013 | CTTCATAGAA | | | | |
| | G | | | | |
| gCD40LG_ | GCTGTGTATC | 267 | 0.02 | 4.6 | 4 |
| 014 | TTCATAGAAG | | | | |
| | G | | | | |
| gCD40LG_ | CTGTGTATCT | 268 | 0.017 | 9.2 | 12.45 |
| 015 | TCATAGAAGG | | | | |
| | T | | | | |
| gCD40LG_ | ATGAATACAA | 269 | 0.019 | 0.004 | 0.018 |
| 016 | AATCTTCATG | | | | |
| | A | | | | |
| gCD40LG_ | CATGAATACA | 270 | 0.021 | 0.009 | 0.005 |
| 017 | AAATCTTCAT | | | | |
| | G | | | | |
| gCD40LG_ | TCCTGTGTTG | 271 | 0.009 | 1.19 | 0.07 |
| 018 | CATCTCTGTA | | | | |
| | T | | | | |
| gCD40LG_ | GTATTCATGA | 272 | 0.023 | 7 | 2 |
| 019 | AAACGATACA | | | | |
| | G | | | | |
| gCD40LG_ | TATTCATGAA | 273 | 0.023 | 1.5 | 1.4 |
| 020 | AACGATACAG | | | | |
| | A | | | | |
| gCD40LG_ | ATCTCCTCAC | 274 | 0.035 | 65 | 63.5 |
| 021 | AGTTCAGTAA | | | | |
| | G | | | | |
| gCD40LG_ | AATCTCCTCA | 275 | 0.035 | 0.26 | 0.29 |
| 022 | CAGTTCAGTA | | | | |
| | A | | | | |
| gCD40LG_ | CCAGTAATTA | 276 | 0.021 | 93 | 74.9 |
| 023 | AGCTGCTTAC | | | | |
| | C | | | | |
| gCD40LG_ | ACCAGTAATT | 277 | 0.023 | 0.53 | 0.019 |
| _ | AAGCTGCTTA | | | | |
| 024 | C | | | | |
| gCD40LG_ | AAGGCTTTGT | 278 | 0.033 | 9.7 | 13 |
| 025 | GAAGGTAAGC | | | | |
| | A | | | | |
| gCD40LG_ | TTCGTCTCCT | 279 | 0.019 | 0.028 | 0.04 |
| 026 | CTTTGTTTAA | | | | |
| | C | | | | |
| gCD40LG_ | TTTCTTCGTC | 280 | 0.026 | 0.013 | 0.25 |
| 027 | TCCTCTTTGT | | | | |
| | T | | | | |
| gCD40LG_ | CTTTCTTCGT | 281 | 0.028 | 0.033 | 0.045 |
| 028 | CTCCTCTTTG | | | | |
| | T | | | | |
| gCD40LG_ | AGGATATAAT | 282 | 0.034 | 1.14 | 0.57 |
| 029 | GTTAAACAAA | | | | |
| | G | | | | |
| gCD40LG_ | GGATATAATG | 283 | 0.034 | 63.5 | 59.9 |
| 030 | TTAAACAAAG | | | | |
| | A | | | | |
| gCD40LG_ | AAAGCTGTTT | 284 | 0.028 | 0.115 | 0.023 |
| 031 | TCTTTCTTCG | | | | |
| | T | | | | |
| gCD40LG_ | CATTTCAAAG | 285 | 0.016 | 0.17 | 0.020 |
| 032 | CTGTTTTCTT | | | | |
| | T | | | | |
| gCD40LG_ | GCATTTCAAA | 286 | 0.016 | 0.015 | 0.021 |
| 033 | GCTGTTTTCT | | | | |
| | T | | | | |
| gCD40LG_ | TGCATTTCAA | 287 | 0.016 | 0.006 | 0.016 |
| 034 | AGCTGTTTTC | | | | |
| | T | | | | |
| gCD40LG_ | AGGATTCTGA | 288 | 0.119 | 80.7 | 59 |
| 035 | TCACCTGAAA | | | | |
| | T | | | | |
| gCD40LG_ | TGGTTCCATT | 289 | 0.078 | 0.25 | 1.3 |
| 036 | TCAGGTGATC | | | | |
| | A | | | | |
| gCD40LG_ | GGTTCCATTT | 290 | 0.073 | 0.13 | 0.33 |
| 037 | CAGGTGATCA | | | | |
| | G | | | | |
| gCD40LG_ | GTTCCATTTC | 291 | 0.073 | 0.017 | 4.9 |
| 038 | AGGTGATCAG | | | | |
| | A | | | | |
| gCD40LG_ | AGGTGATCAG | 292 | 0.021 | 0.009 | 0.009 |
| 039 | AATCCTCAAA | | | | |
| | T | | | | |
| gCD40LG_ | CTGCTGGCCT | 293 | 0.011 | 90.7 | 87 |
| 040 | CACTTATGAC | | | | |
| | A | | | | |
| gCD40LG_ | AGCCCACTGT | 294 | 0.053 | 86.8 | 91.8 |
| 041 | AACACTGTTA | | | | |
| | C | | | | |
| gCD40LG_ | CAGCCCACTG | 295 | 0.053 | 3.7 | 9.1 |
| 042 | TAACACTGTT | | | | |
| | A | | | | |
| gCD40LG_ | TCAGCCCACT | 296 | 0.049 | 17.7 | 5.5 |
| 043 | GTAACACTGT | | | | |
| | T | | | | |
| gCD40LG_ | CCTTTCTTTG | 297 | 0.022 | 22 | 15 |
| 044 | TAACAGTGTT | | | | |
| | A | | | | |
| gCD40LG_ | TTTGTAACAG | 298 | 0.25 | 20 | 14.9 |
| 045 | TGTTACAGTG | | | | |
| | G | | | | |
| gCD40LG_ | TAACAGTGTT | 299 | 0.24 | 37.6 | 42.5 |
| 046 | ACAGTGGGCT | | | | |
| | G | | | | |
| gCD40LG_ | CAGGGTTACC | 300 | 0.013 | 0.23 | 0 |
| 047 | AAGTTGTTGC | | | | |
| | T | | | | |
| gCD40LG_ | CCAGGGTTAC | 301 | 0.008 | 2 | 1.07 |
| 048 | CAAGTTGTTG | | | | |
| | C | | | | |
| gCD40LG_ | CCATTTTCCA | 302 | 0.017 | 24 | 0 |
| 049 | GGGTTACCAA | | | | |
| | G | | | | |
| gCD40LG_ | ACGGTCAGCT | 303 | 0.101 | 5.3 | 0 |
| 050 | GTTTCCCATT | | | | |
| | T | | | | |
| gCD40LG_ | AACGGTCAGC | 304 | 0.101 | 0 | 0 |
| 051 | TGTTTCCCAT | | | | |
| | T | | | | |
| gCD40LG_ | GGCAGAGGCT | 305 | 0.062 | 78.4 | 85 |
| 052 | GGCTATAAAT | | | | |
| | G | | | | |
| gCD40LG_ | TAGCCAGCCT | 306 | 0.090 | 73.6 | 86.6 |
| 053 | CTGCCTAAAG | | | | |
| | T | | | | |
| gCD40LG_ | CAGCTCTGAG | 307 | 0.017 | 4 | 28.6 |
| 054 | TAAGATTCTC | | | | |
| | T | | | | |
| gCD40LG_ | GCGGAACTGT | 308 | 0.015 | 23 | 16.9 |
| 055 | GGGTATTTGC | | | | |
| | A | | | | |
| gCD40LG_ | AATTGCAACC | 309 | 0.020 | 0 | 0.005 |
| 056 | AGGTGCTTCG | | | | |
| | G | | | | |
| gCD40LG_ | TCAATGTGAC | 310 | 0.005 | 9 | 5.9 |
| 057 | TGATCCAAGC | | | | |
| | C | | | | |
| gCD40LG_ | AGTAAGCCAA | 311 | 0.002 | 73 | 70.9 |
| 058 | AGGACGTGAA | | | | |
| | G | | | | |
| gCD40LG_ | GCTTACTCAA | 312 | 0.017 | 2 | 2 |
| 059 | ACTCTGAACA | | | | |
| | G | | | | |

TABLE 16
Selected Spacer Sequences
Targeting Human TRBC1 Genes

| | | SEQ | % | % | % |
|---|---|---|---|---|---|
| | Spacer | ID | INDEL_ | INDEL_ | INDEL_ |
| crRNA | Sequence | NO | control | rep1 | rep2 |
| gTRBC1_ | CAGAGGACCTG | 314 | 0.022 | 1.1 | 0.87 |
| 001 | AACAAGGTGT | | | | |
| gTRBC1_ | CCTCTCCCTGC | 315 | 0.014 | 0.36 | 0.019 |
| 002 | TTTCTTTCAG | | | | |
| gTRBC1_ | CTCTCCCTGCT | 316 | 0.014 | 4 | 2 |
| 003 | TTCTTTCAGA | | | | |
| gTRBC1_ | TTTCAGACTGT | 317 | 0.034 | 1 | 0.31 |
| 004 | GGCTTTACCT | | | | |
| gTRBC1_ | AGACTGTGGCT | 318 | 0.029 | 93.6 | 27.6 |
| 005 | TTACCTCGGG | | | | |
| gTRBC1_ | TCTTCTGCAGG | 319 | 0.028 | 19 | 13 |
| 006 | TCAAGAGAAA | | | | |

TABLE 17
Selected Spacer Sequences Targeting
Human TRBC2 Genes

| | | SEQ | % | % | % |
|---|---|---|---|---|---|
| | Spacer | ID | INDEL_ | INDEL_ | INDEL_ |
| crRNA | Sequence | NO | control | rep1 | rep2 |
| gTRBC2_ | CAGAGGACCTG | 320 | 0.058 | 0.053 | 0.026 |
| 001 | AAAAACGTGT | | | | |
| gTRBC2_ | TCTTCCCCTGT | 321 | 0.019 | 0.022 | 0.021 |
| 002 | TTTCTTTCAG | | | | |
| gTRBC2_ | CTTCCCCTGTT | 322 | 0.021 | 0.021 | 0.018 |
| 003 | TTCTTTCAGA | | | | |
| gTRBC2_ | TTCCCCTGTTT | 323 | 0.021 | 7.5 | 8 |
| 004 | TCTTTCAGAC | | | | |
| gTRBC2_ | CTTTCAGACTG | 324 | 0.028 | 0.045 | 0.038 |
| 005 | TGGCTTCACC | | | | |
| gTRBC2_ | TTTCAGACTGT | 325 | 0.025 | 0.48 | 0.72 |
| 006 | GGCTTCACCT | | | | |
| gTRBC2_ | AGACTGTGGCT | 326 | 0.023 | 29 | 18.6 |
| 007 | TCACCTCCGG | | | | |
| gTRBC2_ | GAGCTAGCCTC | 327 | 0.016 | 17 | 4.5 |
| 008 | TGGAATCCTT | | | | |
| gTRBC2_ | GGAGCTAGCCT | 328 | 0.019 | 67 | 53.7 |
| 009 | CTGGAATCCT | | | | |

TABLE 18
Selected Spacer Sequences
Targeting Human TRBC1_2 Genes

| | | SEQ | % | % | % |
|---|---|---|---|---|---|
| | Spacer | ID | INDEL_ | INDEL_ | INDEL_ |
| crRNA | Sequence | NO | control | rep1 | rep2 |
| gTRBC1_ | GGTGTGGGAGA | 329 | 0.0053 | 93.5 | 58 |
| 2_001 | TCTCTGCTTC | | | | |
| gTRBC1_ | GGTGTGGGAGA | 329 | 0.0063 | 88.6 | 87 |
| 2_001 | TCTCTGCTTC | | | | |
| gTRBC1_ | GGGTGTGGGAG | 330 | 0.0053 | 9.8 | 3.5 |
| 2_002 | ATCTCTGCTT | | | | |
| gTRBC1_ | GGGTGTGGGAG | 330 | 0.0063 | 14 | 6 |
| 2_002 | ATCTCTGCTT | | | | |
| gTRBC1_ | AGCCATCAGAA | 331 | 0.019 | 71.8 | 72 |
| 2_003 | GCAGAGATCT | | | | |
| gTRBC1_ | AGCCATCAGAA | 331 | 0.023 | 66 | 60 |
| 2_003 | GCAGAGATCT | | | | |

TABLE 19
Selected Spacer Sequences Targeting Human CD3E Genes

| | | SEQ | % | % | % |
|---|---|---|---|---|---|
| | | ID | INDEL_ | INDEL_ | INDEL_ |
| crRNA | Spacer Sequence | NO | control | rep1 | rep2 |
| gCD3E_1 | CACTCCATCCTACTCACCIGA | 333 | 0.012 | 26.9 | 26.8 |
| gCD3E_2 | tttttCTTATTTATTTTCTAG | 334 | 0.022 | 0.028 | 0.035 |
| gCD3E_3 | ttttCTTATTTATTTTCTAGT | 335 | 0.022 | 0.018 | 0.02 |
| gCD3E_4 | tttCTTATTTATTTTCTAGTT | 336 | 0.016 | 0.01 | 0.016 |
| gCD3E_5 | ttCTTATTTATTTTCTAGTTG | 337 | 0.016 | 0.007 | 0.02 |
| gCD3E_6 | tCTTATTTATTTTCTAGTTGG | 338 | 0.016 | 0.015 | 0.019 |
| gCD3E_7 | CTTATTTATTTTCTAGTTGGC | 339 | 0.088 | 0.058 | 0.037 |
| gCD3E_8 | TTATTTATTTTCTAGTTGGCG | 340 | 0.088 | 0.088 | 0.061 |
| gCD3E_9 | TTTTCTAGTTGGCGTTTGGGG | 341 | 0.084 | 0.086 | 0.049 |
| gCD3E_ | CTAGTTGGCGTTTGGGGGCAA | 342 | 0.081 | 0.51 | 0.29 |
| 10 | | | | | |
| gCD3E_ | TAGTTGGCGTTTGGGGGCAAG | 343 | 0.081 | 5.96 | 1.97 |
| 11 | | | | | |
| gCD3E_ | CTTTTCAGGTAATGAAGAAAT | 344 | 0.041 | 38.5 | 31.9 |
| 12 | | | | | |
| gCD3E_ | CAGGTAATGAAGAAATGGGTA | 345 | 0.042 | 1.5 | 1.66 |
| 13 | | | | | |
| gCD3E_ | AGGTAATGAAGAAATGGGTAA | 346 | 0.042 | 68 | 75 |
| 14 | | | | | |
| gCD3E_ | CTTTTTTCATTTTCAGGTGGT | 347 | 0.059 | 0.17 | 0.15 |
| 15 | | | | | |
| gCD3E_ | TTCATTTTCAGGTGGTATTAC | 348 | 0.019 | 31 | 0.05 |
| 16 | | | | | |
| gCD3E_ | TCATTTTCAGGTGGTATTACA | 349 | 0.019 | 0.031 | 0.01 |
| 17 | | | | | |
| gCD3E_ | CATTTTCAGGTGGTATTACAC | 350 | 0.015 | 0.032 | 0.66 |
| 18 | | | | | |
| gCD3E_ | ATTTTCAGGTGGTATTACACA | 351 | 0.0149 | 50.6 | 41 |
| 19 | | | | | |
| gCD3E_ | CAGGTGGTATTACACAGACAC | 352 | 0.027 | 69.5 | 43.8 |
| 20 | | | | | |
| gCD3E_ | AGGTGGTATTACACAGACACG | 353 | 0.020 | 90.5 | 87.3 |
| 21 | | | | | |
| gCD3E_ | CCTTCTTTCTCCCCAGCATAT | 354 | 0.083 | 24 | 14 |
| 22 | | | | | |
| gCD3E_ | TCCCCAGCATATAAAGTCTCC | 355 | 0.041 | 0.61 | 10 |
| 23 | | | | | |
| gCD3E_ | AGATCCAGGATACTGAGGGCA | 356 | 0.039 | 76.6 | 59 |
| 24 | | | | | |
| gCD3E_ | tcatTGTGTTGCCATAGTATT | 357 | 0.0029 | 44.8 | 43.5 |
| 25 | | | | | |
| gCD3E_ | atcatTGTGTTGCCATAGTAT | 358 | 0.0029 | 3.85 | 0.02 |
| 26 | | | | | |
| gCD3E_ | tatcatTGTGTTGCCATAGTA | 359 | 0.0059 | 0 | 0.03 |
| 27 | | | | | |
| gCD3E_ | tcatcctcatcaccgcctatg | 360 | 0.050 | 0 | 70 |
| 28 | | | | | |
| gCD3E_ | atcatcctcatcaccgcctat | 361 | 0.050 | 30 | 17.8 |
| 29 | | | | | |
| gCD3E_ | tatcatcctcatcaccgccta | 362 | 0.050 | 5 | 1.39 |
| 30 | | | | | |
| CD33E_ | CTCCAATTCTGAAAATTCCTT | 363 | 0.014 | 0 | 0.017 |
| 31 | | | | | |
| CD33E_ | CAGAATTGGAGCAAAGTGGTT | 364 | 0.021 | 0.065 | 0.20 |
| 32 | | | | | |
| CD33E_ | AGAATTGGAGCAAAGTGGTTA | 365 | 0.021 | 22.8 | 23 |
| 33 | | | | | |
| CD33E_ | CTTCCTCTGGGGTAGCAGACA | 366 | 0.020 | 99.9 | 84.6 |
| 34 | | | | | |
| CD33E_ | ATCTCTACCTGAGGGCAAGAG | 367 | 0.055 | 0.30 | 1.69 |
| 35 | | | | | |
| CD33E_ | TCTCTACCTGAGGGCAAGAGG | 368 | 0.055 | 32.9 | 36.8 |
| 36 | | | | | |
| CD33E_ | TATTCTTGCTCCAGTAGTAAA | 369 | 0.027 | 2 | 3.5 |
| 37 | | | | | |
| CD33E_ | CTACTGGAGCAAGAATAGAAA | 370 | 0.013 | 81 | 75 |
| 38 | | | | | |
| CD33E_ | CCTGCCGCCAGCACCCGCTCC | 371 | 0.008 | 32.6 | 28.9 |
| 39 | | | | | |
| gCD3E_ | CCCTCCTTCCTCCGCAGGACA | 372 | 0.031 | 77.9 | 67 |
| 40 | | | | | |
| gCD3E_ | TATCCCACGTTACCTCATAGT | 373 | 0.015 | 35.2 | 19 |
| 41 | | | | | |
| gCD3E_ | ACCCCCAGCCCATCCGGAAAG | 374 | 0.029 | 79 | 82 |
| 42 | | | | | |

TABLE 20
Tested crRNAs Targeting Certain
Other Human Genes

| | | SEQ | |
|---|---|---|---|
| | | ID | % |
| crRNA | Spacer Sequence | NO | Indel |
| gDHODH_1 | TTGCAGAAGCGGGCCCAGGAT | 770 | 0.60 |
| gDHODH_2 | TTGCAGAAGCGGGCCCAGGAT | 771 | 0.59 |
| gDHODH_3 | TATGCTGAACACCTGATGCCG | 772 | 74.94 |
| gPLK1_1 | CCAGGGTCGGCCGGTGCCCGT | 773 | 29.06 |
| gPLK1_2 | GCCGGTGGAGCCGCCGCCGGA | 774 | 2.01 |
| gPLK1_3 | TGGGCAAGGGCGGCTTTGCCA | 775 | 2.26 |
| gPLK1_4 | GGGCAAGGGCGGCTTTGCCAA | 776 | 28.24 |
| gPLK1_5 | GGCAAGGGCGGCTTTGCCAAG | 777 | 28.41 |
| gPLK1_6 | CCAAGTGCTTCGAGATCTCGG | 778 | 2.07 |
| gPLK1_7 | CATGGACATCTTCTCCCTCTG | 779 | 90.07 |
| gPLK1_8 | TCGAGGACAACGACTTCGTGT | 780 | 0.16 |
| gPLK1_9 | CGAGGACAACGACTTCGTGTT | 781 | 6.84 |
| gPLK1_10 | GAGGACAACGACTTCGTGTTC | 782 | 8.52 |
| gMVD_1 | CAGTTAAAAACCACCACAACA | 783 | 1.42 |
| gMVD_2 | GCTGAATGGCCGGGAGGAGGA | 784 | 14.06 |
| gMVD_3 | TGGAGTGGCAGATGGGAGAGC | 785 | 63.22 |
| gTUBB_1 | AACCATGAGGGAAATCGTGCA | 786 | 2.61 |
| gTUBB_2 | ACCATGAGGGAAATCGTGCAC | 787 | 68.40 |
| gTUBB_3 | TTCTCTGTAGGTGGCAAATAT | 788 | 18.67 |
| gU6_1 | GTCCTTTCCACAAGATATATA | 763 | 68.1 |
| gU6_2 | GATTTCTTGGCTTTATATATC | 764 | 0.71 |
| gU6_3 | TTGGCTTTATATATCTTGTGG | 765 | 2.83 |
| gU6_4 | GCTTTATATATCTTGTGGAAA | 766 | 0.37 |
| gU6_5 | ATATATCTTGTGGAAAGGACG | 767 | 0.39 |
| gU6_6 | TATATCTTGTGGAAAGGACGA | 768 | 0.39 |
| gU6_7 | TGGAAAGGACGAAACACCGTG | 769 | 0.24 |

### Example 2. Knock Out of Human CD38 by Single Guide MAD7 CRISPR-Cas Systems

[0331] MAD7 is a type V-A Cas protein that has endonuclease activity when complexed with a single guide RNA, also known as a crRNA in a type V-A system (see, U.S. Pat. No. 9,982,279). This example describes cleavage of the genomic DNA of primary Pan T-cells using MAD7 in complex with single guide nucleic acids targeting human CD38 gene and analysis on a genome and functional level. CD38 is a surface marker expressed on natural killer cells. Given CD38 is a target for multiple myeloma, anti-CD38 or CD38-CAR cells target CD38 expressing natural killer cells. Therefore, knockout of CD38 in natural killer cells protect them from anti-CD38 treatment.

[0332] Briefly, Pan T-cells were isolated from Leukopaks (StemCell Technology) using EasySep Direct Human T cell Isolation Kit (StemCell Technology Catalog #19661) and cryopreserved using CryoStor CS10 (StemCell Technology Catalog #07930). The cells were thawed and activated with ImmunoCult Human CD3/CD28 T Cell Activator (StemCell Technology Catalog #10991) and cultivated in ImmunoCult-XF T Cell Expansion Medium (StemCell Technology, Catalog #10981) supplemented with IL2 (StemCell Technology Catalog #78036.3) at 37° C. in a 5% CO₂ environment, and transfected after approximately 48 hours with RNPs, consisting of MAD7 protein and synthetic gRNA. MAD7 protein, which contained a nucleoplasmin NLS at the C-terminus, was expressed in E. coli and purified by fast protein liquid chromatography (FPLC). RNP complexes were prepared by incubating 100 pmol MAD7 protein with 100 pmol chemically synthesized single guide RNA for 10 minutes at room temperature. The RNPs were mixed with 1,000,000 Pan T-cells resuspended in nucleofection buffer P3 (Lonza) in a final volume of 25 μL. Electroporation was carried out on a 4D-Nucleofector (Lonza) using program EO-115. Following electroporation, the cells were cultured for 2-3 days.

[0333] Genomic DNA of the cells was extracted using the Quick Extract DNA extraction solution 1.0 (Epicentre). The genes fragments were amplified from the genomic DNA samples in a PCR reaction with primers with overhang adaptors and processed using the Nextera XT designed primers (IDT). The final PCR products were analyzed by next-generation sequencing, and the data were analyzed with the Crispresso (see, Clement et al. (2019), CRISPResso2 provides accurate and rapid genome editing sequence analysis. Nat Biotechnol. 2019 March; 37(3):224-226. doi: 10.1038/s41587-019-0032-3. PubMed PMID: 30809026). Editing efficiency was determined by the number of edited reads relative to the total number of reads obtained under each condition.

[0334] The nucleotide sequence of each single guide RNA used in this example consisted of, from 5′ to 3′, UAAUUUCUACUCUUGUAGAU (SEQ ID NO: 50) and a spacer sequence. In SEQ ID NO: 50, the modulator stem sequence (UCUAC) and the targeter stem sequence (GUAGA) are underlined. The editing efficiency of each single guide RNA was measured as the percentage of cells having one or more insertion or deletion at the target site (% indel). The spacer sequences tested for targeting human CD38 are shown in Table 7. The editing efficiency of each single guide RNA targeting human CD38 is shown in FIG. 3A. Six spacer sequences in particular demonstrate high (>30%) gene editing efficiency: gCD38_003 (SEQ ID NO: 377), gCD38_020 (SEQ ID NO: 394), gCD38_022 (SEQ ID NO: 396), gCD38_028 (SEQ ID NO: 402), gCD38_029 (SEQ ID NO: 403), gCD38_030 (SEQ ID NO: 404).

[0335] To functional analyze the editing outcome we used antibody staining of the cells and flowcytometry to determine the negative cell population of the edited protein coding gene. Briefly, 1,000,000 cells/ml were harvested and washed with Cell Staining Buffer (Biolegend, catalog #420201), incubated with a fluorophore tagged antibody against the protein of interest or an indirect marker for the protein of interest, washed with Cell Staining Buffer (Biolegend, catalog #420201), resuspended in 1×PBS and analyzed by Flow cytometry. The data were analyzed using Flowjo, gated for viable, single cells and the negative cell population of the stained protein were determined. The percent of negative cells in a population is plotted against each single guide RNA tested in FIG. 3B. A no gRNA control sample was also tested resulting in a negative cell population of 37%. The same six spacer sequences demonstrating high gene editing efficiency in FIG. 3A demonstrate high negative cell populations (>50%): gCD38_003 (SEQ ID NO: 377), gCD38_020 (SEQ ID NO: 394), gCD38_022 (SEQ ID NO: 396), gCD38_028 (SEQ ID NO: 402), gCD38_029 (SEQ ID NO: 403), gCD38_030 (SEQ ID NO: 404).

### Example 3. Knock Out of Other Human Genes by Single Guide MAD7 CRISPR-Cas Systems

[0336] MAD7 is a type V-A Cas protein that has endonuclease activity when complexed with a single guide RNA, also known as a crRNA in a type V-A system (see, U.S. Pat. No. 9,982,279). This example describes cleavage of the genomic DNA of primary Pan T-cells using MAD7 in complex with single guide nucleic acids targeting various human genomic targets to identify factors to generate allogenic cells by reducing the surface levels of HLA class I and II proteins.

[0337] Briefly, Pan T-cells were isolated from Leukopaks (StemCell Technology) using EasySep Direct Human T cell Isolation Kit (StemCell Technology Catalog #19661) and cryopreserved using CryoStor CS10 (StemCell Technology Catalog #07930). The cells were thawed and activated with ImmunoCult Human CD3/CD28 T Cell Activator (StemCell Technology Catalog #10991) and cultivated in ImmunoCult-XF T Cell Expansion Medium (StemCell Technology, Catalog #10981) supplemented with IL2 (StemCell Technlogy Catalog #78036.3) at 37° C. in a 5% CO₂ environment, and transfected after approximately 48 hours with RNPs, consisting of MAD7 protein and synthetic gRNA. MAD7 protein, which contained a nucleoplasmin NLS at the C-terminus, was expressed in E. coli and purified by fast protein liquid chromatography (FPLC). RNP complexes were prepared by incubating 100 pmol MAD7 protein with 100 pmol chemically synthesized single guide RNA for 10 minutes at room temperature. The RNPs were mixed with 1,000,000 Pan T-cells resuspended in nucleofection buffer P3 (Lonza) in a final volume of 25 μL. Electroporation was carried out on a 4D-Nucleofector (Lonza) using program EO-115. Following electroporation, the cells were cultured for 2-3 days.

[0338] Genomic DNA of the cells was extracted using the Quick Extract DNA extraction solution 1.0 (Epicentre). The genes fragments were amplified from the genomic DNA samples in a PCR reaction with primers with overhang adaptors and processed using the Nextera XT designed primers (IDT). The final PCR products were analyzed by next-generation sequencing, and the data were analyzed with the Crispresso (see, Clement et al. (2019), CRISPResso2 provides accurate and rapid genome editing sequence analysis. Nat Biotechnol. 2019 March; 37(3):224-226. doi: 10.1038/s41587-019-0032-3. PubMed PMID: 30809026). Editing efficiency was determined by the number of edited reads relative to the total number of reads obtained under each condition.

[0339] The nucleotide sequence of each single guide RNA used in this example consisted of, from 5′ to 3′, UAAUUUCUACUCUUGUAGAU (SEQ ID NO: 50) and a spacer sequence. In SEQ ID NO: 50, the modulator stem sequence (UCUAC) and the targeter stem sequence (GUAGA) are underlined. The editing efficiency of each single guide RNA was measured as the percentage of cells having one or more insertion or deletion at the target site (% indel). The spacer sequences tested are shown in Table 8. The editing efficiency of each single guide RNA for each gene target (separate subplots) is shown in FIGS. 4 A-F, with the editing efficiency as measured by INDEL formation on the y-axis and the spacer sequence on the x-axis.

### Example 4. Knock Out of Human CD3D and NLRC5 Genes by Single Guide MAD7 CRISPR-Cas Systems

[0340] MAD7 is a type V-A Cas protein that has endonuclease activity when complexed with a single guide RNA, also known as a crRNA in a type V-A system (see, U.S. Pat. No. 9,982,279). This example describes cleavage of the genomic DNA of primary Pan T-cells using MAD7 in complex with single guide nucleic acids targeting human CD3D and NLRC5 to identify factors to generate allogenic cells by reducing the surface levels of HLA class I and II proteins.

[0341] Briefly, Pan T-cells were isolated from Leukopaks (StemCell Technology) using EasySep Direct Human T cell Isolation Kit (StemCell Technology Catalog #19661) and cryopreserved using CryoStor CS10 (StemCell Technology Catalog #07930). The cells were thawed and activated with ImmunoCult Human CD3/CD28 T Cell Activator (StemCell Technology Catalog #10991) and cultivated in ImmunoCult-XF T Cell Expansion Medium (StemCell Technology, Catalog #10981) supplemented with IL2 (StemCell Technlogy Catalog #78036.3) at 37° C. in a 5% CO₂ environment, and transfected after approximately 48 hours with RNPs, consisting of MAD7 protein and synthetic gRNA. MAD7 protein, which contained a nucleoplasmin NLS at the C-terminus, was expressed in E. coli and purified by fast protein liquid chromatography (FPLC). RNP complexes were prepared by incubating 100 pmol MAD7 protein with 100 pmol chemically synthesized single guide RNA for 10 minutes at room temperature. The RNPs were mixed with 1,000,000 Pan T-cells resuspended in nucleofection buffer P3 (Lonza) in a final volume of 25 μL. Electroporation was carried out on a 4D-Nucleofector (Lonza) using program EO-115. Following electroporation, the cells were cultured for 2-3 days.

[0342] The nucleotide sequence of each single guide RNA used in this example consisted of, from 5′ to 3′, UAAUUUCUACUCUU\vec{GUAGA}U (SEQ ID NO: 50) and a spacer sequence. In SEQ ID NO: 50, the modulator stem sequence (UCUAC) and the targeter stem sequence (GUAGA) are underlined. The editing efficiency of each single guide RNA was measured as the percentage of cells having one or more insertion or deletion at the target site (% indel). The spacer sequences tested for targeting human CD3D and NLRC5 are shown in Table 8. The spacer sequence for gB2M_30 was 5′ AGTGGGGGTGAATTCAGTGTA 3′, for gCIITA_80 was 5′ CAAGGACTTCAGCTGGGGGAA 3′, and for gTRAC_043 was 5′ GAGTCTCTCAGCTGGTACACG 3′.

[0343] To functionally analyze the editing outcome we used antibody staining of the cells and flowcytometry to determine the negative cell population of the edited protein coding gene. Briefly, 1,000,000 cells/ml were harvested and washed with Cell Staining Buffer (Biolegend, catalog #420201), incubated with a fluorophore tagged antibody against the protein of interest or an indirect marker for the protein of interest, washed with Cell Staining Buffer (Biolegend, catalog #420201), resuspended in 1×PBS and analyzed by Flowcytometry. The data were analyzed using Flowjo, gated for viable, single cells and the negative cell population of the stained protein were determined. The percent of negative cells in a population is plotted against each CD3D and NLRC5 single guide RNA tested for TCR, HLA-I, and HLA-II surface markers in FIGS. 5A and B respectively. A no gRNA control sample was also tested for each of the three surface markers shown as the far right bar.

[0344] As shown in FIG. 5A black bars, four sgRNAs demonstrated reduced TCR surface marker expression (higher % negative cells) compared the no sgRNA control: gCD3D_002 (SEQ ID NO: 717), gCD3D_003 (SEQ ID NO: 718), gCD3D_005 (SEQ ID NO: 720), and gCD3D_010 (SEQ ID NO: 725).

[0345] As show in FIG. 5B gray bars, nine sgRNAs demonstrated reduced HLA-I surface marker expression (higher % negative cells) compared to the no sgRNA control: gNLRC5_002 (SEQ ID NO: 727), gNLRC5_005 (SEQ ID NO: 730), gNLRC5_008 (SEQ ID NO: 733), gNLRC5_010 (SEQ ID NO: 735), gNLRC5_011 (SEQ ID NO: 736), gNLRC5_012 (SEQ ID NO: 737), gNLRC5_014 (SEQ ID NO: 739), gNLRC5_018 (SEQ ID NO: 743), gNLRC5_019 (SEQ ID NO: 744).

### Example 5. Knock in of DSG3 CAAR into TRBC1/2 or CD3E Loci

[0346] This example demonstrates the use of the TRBC1/2 and CD3E loci for knock in of one or more heterologous genes, specifically a DSG3 CAAR. A CAAR (chimeric autoantibody receptor) is a CAR-like protein, wherein instead of comprising a extracellularly-displayed binding domain as for a CAR, a CAAR comprises an extracellularly-displayed antigen. When bound by a B-cell, a CAAR triggers an intracellular cascade that results in the eventual death of the B-cell, thereby demonstrating utility to treat autoimmune disease. Further the example demonstrates the utility of the TRBC1/2 and CD3E loci for knock in in both Pan T-cells and Jurkat cells.

[0347] Briefly, Pan T-cells were isolated from Leukopaks (StemCell Technology) using EasySep Direct Human T cell Isolation Kit (StemCell Technology Catalog #19661) and cryopreserved using CryoStor CS10 (StemCell Technology Catalog #07930). The cells were thawed and activated with ImmunoCult Human CD3/CD28 T Cell Activator (StemCell Technology Catalog #10991) and cultivated in ImmunoCult-XF T Cell Expansion Medium (StemCell Technology, Catalog #10981) supplemented with IL2 (StemCell Technlogy Catalog #78036.3) at 37° C. in a 5% CO₂ environment, and transfected after approximately 48 hours with RNPs, consisting of MAD7 protein and synthetic gRNA. MAD7 protein, which contained a nucleoplasmin NLS at the C-terminus, was expressed in E. coli and purified by fast protein liquid chromatography (FPLC). RNP complexes were prepared by incubating 100 pmol MAD7 protein with 100 pmol chemically synthesized single guide RNA for 10 minutes at room temperature. The RNPs were mixed with 1,000,000 Pan T-cells resuspended in nucleofection buffer P3 (Lonza) in a final volume of 25 μL. Electroporation was carried out on a 4D-Nucleofector (Lonza) using program EO-115. Following electroporation, the cells were cultured for 3 days prior to passaging at 1:1 v:v dilution.

[0348] Briefly, Jurkat cells were thawed from a glycerol stock stored at −80° C. and seeded into RPMI with 10% FBS at concentration of 1E5 cells/mL. The cells were grown at at 37° C. in a 5% CO₂ environment, and transfected after approximately 48 hours with RNPs, consisting of MAD7 protein and synthetic gRNA. MAD7 protein, which contained a nucleoplasmin NLS at the C-terminus, was expressed in E. coli and purified by fast protein liquid chromatography (FPLC). RNP complexes were prepared by incubating 100 pmol MAD7 protein with 100 pmol chemically synthesized single guide RNA for 10 minutes at room temperature along with 0.3, 0.6, or 0.9 ug of donor template. The RNPs were mixed with 1,000,000 Jurkat cells resuspended in nucleofection buffer P3 (Lonza) in a final volume of 25 μL. Electroporation was carried out on a 4D-Nucleofector (Lonza) using program EO-115. Following electroporation, the cells were cultured for 1 day prior to passaging at 1:1 v:v dilution.

[0349] For the TRBC1/2 and CD3E, synthetic guides comprising spacer sequences gTRBC1_2_003 (SEQ ID NO: 331) and gCD3E_34 (SEQ ID NO: 366) were used respectively. ART-21-100 and ART-21-101 plasmids comprising the DSG3 CAAR were used as donor templates.

[0350] The ART-21-100_pUCmu-gCD3e34-DSG3-EC1-3 donor template for knock in of the CAAR at the CD3E locus is shown below with the DSG3 CAAR sequence in bold:

CGCGTATTGGGATCCTCAGCGTTCCAAATAGGGACTTCTGTGGGT
TTTTCTTTACATCCATCTTACCCTTCCCAAGTCCCCATGTCCCTG
CGTAAACCCTAAAGCCACCTCTCAAAAGGTTCTCTAGTTCCCTTC
AAGGTTCTCTAGTTCCCTTCATTCCACATATCTCCTCTTCCACAC
CCTCTAGCCAGTAGAGCTCCCTTCTGACAAGCAAGTCTAAGATCT
AGATGACAGATGACTTCCTGCATTTGGGTGGTTCTTTTGTCACTA
ATTTGCCTTTTCTAAAATTGTCCTGGTTTCTTCTGCCAATTTCCC
TTCTTTCTCCCCAGCATATAAAGTCTCCATCTCTGGAACCACAGT
AATATTGACATGCCCTCAGTATCCTGGATCTGAAATACTATGGCA
ACACAATGATAAAAACATAGGCGGTGATGAGGATGATAAAAACAT
AGGCAGTGATGAGGATCACCTGTCACTGAAGGAATTTTCAGAATT
GGAGCAAAGTGGTTATTATGTCTGCCGTGAGGCTCCGGTGCCCGT
CAGTGGGCAGAGCGCACATCGCCCACAGTCCCCGAGAAGTTGGGG
GGAGGGGTCGGCAATTGAACCGGTGCCTAGAGAAGGTGGCGCGGG
GTAAACTGGGAAAGTGATGTCGTGTACTGGCTCCGCCTTTTTCCC
GAGGGTGGGGGAGAACCGTATATAAGTGCAGTAGTCGCCGTGAAC
GTTCTTTTTCGCAACGGGTTTGCCGCCAGAACACAGGTAAGTGCC
GTGTGTGGTTCCCGCGGGCCTGGCCTCTTTACGGGTTATGGCCCT
TGCGTGCCTTGAATTACTTCCACCTGGCTGCAGTACGTGATTCTT
GATCCCGAGCTTCGGGTTGGAAGTGGGTGGGAGAGTTCGAGGCCT
TGCGCTTAAGGAGCCCCTTCGCCTCGTGCTTGAGTTGAGGCCTGG
CCTGGGCGCTGGGGCCGCCGCGTGCGAATCTGGTGGCACCTTCGC
GCCTGTCTCGCTGCTTTCGATAAGTCTCTAGCCATTTAAAATTTT
TGATGACCTGCTGCGACGCTTTTTTTCTGGCAAGATAGTCTTGTA
AATGCGGGCCAAGATCTGCACACTGGTATTTCGGTTTTTGGGGCC
GCGGGCGGCGACGGGGCCCGTGCGTCCCAGCGCACATGTTCGGCG
AGGCGGGGCCTGCGAGCGCGGCCACCGAGAATCGGACGGGGGTAG
TCTCAAGCTGGCCGGCCTGCTCTGGTGCCTGGCCTCGCGCCGCCG
TGTATCGCCCCGCCCTGGGCGGCAAGGCTGGCCCGGTCGGCACCA
GTTGCGTGAGCGGAAAGATGGCCGCTTCCCGGCCCTGCTGCAGGG
AGCTCAAAATGGAGGACGCGGCGCTCGGGAGAGCGGGCGGGTGAG
TCACCCACACAAAGGAAAAGGGCCTTTCCGTCCTCAGCCGTCGCT
TCATGTGACTCCACTGAGTACCGGGCGCCGTCCAGGCACCTCGAT
TAGTTCTCGTGCTTTTGGAGTACGTCGTCTTTAGGTTGGGGGGAG
GGGTTTTATGCGATGGAGTTTCCCCACACTGAGTGGGTGGAGACT
GAAGTTAGGCCAGCTTGGCACTTGATGTAATTCTCCTTGGAATTT
GCCCTTTTTGAGTTTGGATCTTGGTTCATTCTCAAGCCTCAGACA
GTGGTTCAAAGTTTTTTTCTTCCATTTCAGGTGTCGTGAGCTAGA
GCCACCATGGAGTTTGGGCTGAGCTGGCTTTTTCTTGTGGCTATT
TTAAAAGGTGTCCAGTGCGGATCCGAGCTGCGGATCGAGACAAAG
GGCCAGTACGACGAGGAAGAGATGACAATGCAGCAGGCCAAGCGG
CGGCAGAAACGCGAGTGGGTCAAGTTCGCCAAGCCCTGCAGAGAG
GGCGAGGACAACAGCAAGCGGAACCCTATCGCCAAGATCACCAGC
GACTACCAGGCCACCCAGAAGATCACCTACCGGATCAGCGGCGTG
GGCATCGACCAGCCCCCTTTCGGCATCTTCGTGGTGGACAAGAAC
ACCGGCGACATCAACATCACCGCCATCGTGGACAGAGAGGAAACC
CCCAGCTTCCTGATCACCTGTCGGGCCCTGAATGCCCAGGGCCTG
GACGTGGAAAAGCCCCTGATCCTGACCGTGAAGATCCTGGACATC
AACGACAACCCCCCCGTGTTCAGCCAGCAGATCTTCATGGGCGAG
ATCGAGGAAAACAGCGCCAGCAACAGCCTCGTGATGATCCTGAAC
GCCACCGACGCCGACGAGCCCAACCACCTGAATAGCAAGATCGCC
TTCAAGATCGTGTCCCAGGAACCCGCCGGAACCCCCATGTTCCTG
CTGAGCAGAAATACCGGCGAAGTGCGGACCCTGACCAACAGCCTG
GATAGAGAGCAGGCCAGCAGCTACCGGCTGGTGGTGTCTGGCGCT
GACAAGGATGGCGAGGGCCTGAGCACACAGTGCGAGTGCAACATC
AAAGTGAAGGACGTGAACGACAACTTCCCTATGTTCCGGGACAGC
CAGTACAGCGCCCGGATCGAAGAGAACATCCTGAGCAGCGAGCTG
CTGCGGTTCCAAGTGACCGACCTGGACGAAGAGTACACCGACAAC
TGGCTGGCCGTGTACTTCTTCACCAGCGGCAACGAGGGCAATTGG
TTCGAGATCCAGACCGACCCCCGGACCAATGAGGGCATCCTGAAG
GTCGTGAAGGCCCTGGACTACGAGCAGCTGCAGAGCGTGAAGCTG
TCTATCGCCGTGAAGAACAAGGCCGAGTTCCACCAGTCCGTGATC
AGCCGGTACAGAGTGCAGAGCACCCCCGTGACCATCCAAGTGATC
AACGTGCGCGAGGGCATTGCCTTCGCTAGCGGTGGCGGAGGTTCT
GGAGGTGGAGGTTCCTCCGGAATCTACATCTGGGCGCCCTTGGCC
GGGACTTGTGGGGTCCTTCTCCTGTCACTGGTTATCACCCTTTAC
TGCAAACGGGGCAGAAAGAAACTCCTGTATATATTCAAACAACCA
TTTATGAGACCAGTACAAACTACTCAAGAGGAAGATGGCTGTAGC
TGCCGATTTCCAGAAGAAGAAGAAGGAGGATGTGAACTGAGAGTG
AAGTTCAGCAGGAGCGCAGACGCCCCCGCGTACCAGCAGGGCCAG
AACCAGCTCTATAACGAGCTCAATCTAGGACGAAGAGAGGAGTAC
GATGTTTTGGACAAGAGACGTGGCCGGGACCCTGAGATGGGGGGA
AAGCCGAGAAGGAAGAACCCTCAGGAAGGCCTGTACAATGAACTG
CAGAAAGATAAGATGGCGGAGGCCTACAGTGAGATTGGGATGAAA
GGCGAGCGCCGGAGGGGCAAGGGGCACGATGGCCTTTACCAGGGT
CTCAGTACAGCCACCAAGGACACCTACGACGCCCTTCACATGCAG
GCCCTGCCCCCTCGCTAAGTCGACAATCAACCTCTGGATTACAAA
ATTTGTGAAAGATTGACTGGTATTCTTAACTATGTTGCTCCTTTT
ACGCTATGTGGATACGCTGCTTTAATGCCTTTGTATCATGCTATT
GCTTCCCGTATGGCTTTCATTTTCTCCTCCTTGTATAAATCCTGG
TTGCTGTCTCTTTATGAGGAGTTGTGGCCCGTTGTCAGGCAACGT
GGCGTGGTGTGCACTGTGTTTGCTGACGCAACCCCCACTGGTTGG
GGCATTGCCACCACCTGTCAGCTCCTTTCCGGGACTTTCGCTTTC
CCCCTCCCTATTGCCACGGCGGAACTCATCGCCGCCTGCCTTGCC
CGCTGCTGGACAGGGGCTCGGCTGTTGGGCACTGACAATTCCGTG
GTGTTGTCGGGGAAGCTGACGTCCTTTCCTTGGCTGCTCGCCTGT
GTTGCCACCTGGATTCTGCGCGGGACGTCCTTCTGCTACGTCCCT
TCGGCCCTCAATCCAGCGGACCTTCCTTCCCGCGGCCTGCTGCCG
GCTCTGCGGCCTCTTCCGCGTCTTCGCCTTCGCCCTCAGACGAGT
CGGATCTCCCTTTGGGCCGCCTCCCCGCCTGCGACTGTGCCTTCT
AGTTGCCAGCCATCTGTTGTTTGCCCCTCCCCCGTGCCTTCCTTG
ACCCTGGAAGGTGCCACTCCCACTGTCCTTTCCTAATAAAATGAG
GAAATTGCATCGCATTGTCTGAGTAGGTGTCATTCTATTCTGGGG
GGTGGGGTGGGGCAGGACAGCAAGGGGGAGGATTGGGAAGACAAT
AGCAGGCATGCTGGGGATGCGGTGGGCTCTATGGTACCCCAGAGG
AAGCAAACCAGAAGATGCGAACTTTTATCTCTACCTGAGGGCAAG
AGGTAATCCAGGTCTCCAGAACAGGTACCACCGGCTCTTTAGGGA
GGACCATTCAAAAGGGCATTCTCAGTGATTTTCCCTAACCCAGCT
CACAGTGCCCAGGCGTCTTTGCGCTTCCTCCCACACTCAATCCTG
GGACTCTCTGGTACCACACGGCATCAGTGTTTTCTGGAATATAGA
TTAAACACCAATATGAGGCTTCTGGGTAACCCCAGTCTGTGCGAG
ATCTAAAATAGCAACTCCCTAAGAGACAGGACTGGGTCATTTGCA
CCGCATCACACCCAGGTTCATAGCACACCAACATGAGTTTATCTA
ATGCTTCCTCCAGAGATAAATTTTTCAGAAAGGTTTGCAAAAAAC
ACTCAAGGCCACTATAGTAAAATGGCATAAGCTAAGGTATAATAA
TAAAATAATAACAATACTTAACATTTATTGAGTGCTTATGCGGCC
GCTGTCTGCTACCCCAGAGGAAGCAAACAGGTCGACTCTAGAGGA
TCCCGGGTACCGAGCTCGAATTCGGATATCCTCGAGACTAGTGGG
CCCGTTTAAACACATGTGTTTTTCCATAGGCTCCGCCCCCCTGAC
GAGCATCACAAAAATCGACGCTCAAGTCAGAGGTGGCGAAACCCG
ACAGGACTATAAAGATACCAGGCGTTTCCCCCTGGAAGCTCCCTC
GTGCGCTCTCCTGTTCCGACCCTGCCGCTTACCGGATACCTGTCC
GCCTTTCTCCCTTCGGGAAGCGTGGCGCTTTCTCATAGCTCACGC
TGTAGGTATCTCAGTTCGGTGTAGGTCGTTCGCTCCAAGCTGGGC
TGTGTGCACGAACCCCCCGTTCAGCCCGACCGCTGCGCCTTATCC
GGTAACTATCGTCTTGAGTCCAACCCGGTAAGACACGACTTATCG
CCACTGGCAGCAGCCACTGGTAACAGGATTAGCAGAGCGAGGTAT
GTAGGCGGTGCTACAGAGTTCTTGAAGTGGTGGCCTAACTACGGC
TACACTAGAAGAACAGTATTTGGTATCTGCGCTCTGCTGAAGCCA
GTTACCTTCGGAAAAAGAGTTGGTAGCTCTTGATCCGGCAAACAA
ACCACCGCTGGTAGCGGTGGTTTTTTTGTTTGCAAGCAGCAGATT
ACGCGCAGAAAAAAAGGATCTCAAGAAGATCCTTTGATCTTTTCT
ACTACCAATGCTTAATCAGTGAGGCACCTATCTCAGCGATCTGTC
TATTTCGTTCATCCATAGTTGCCTGACTCCCCGTCGTGTAGATAA
CTACGATACGGGAGGGCTTACCATCTGGCCCCAGTGCTGCAATGA
TACCGCGAGACCCACGCTCACCGGCTCCAGATTTATCAGCAATAA
ACCAGCCAGCCGGAAGGGCCGAGCGCAGAAGTGGTCCTGCAACTT
TATCCGCCTCCATCCAGTCTATTAATTGTTGCCGGGAAGCTAGAG
TAAGTAGTTCGCCAGTTAATAGTTTGCGCAACGTTGTTGCCATTG
CTACAGGCATCGTGGTGTCACGCTCGTCGTTTGGTATGGCTTCAT
TCAGCTCCGGTTCCCAACGATCAAGGCGAGTTACATGATCCCCCA
TGTTGTGCAAAAAAGCGGTTAGCTCCTTCGGTCCTCCGATCGTTG
TCAGAAGTAAGTTGGCCGCAGTGTTATCACTCATGGTTATGGCAG
CACTGCATAATTCTCTTACTGTCATGCCATCCGTAAGATGCTTTT
CTGTGACTGGTGAGTACTCAACCAAGTCATTCTGAGAATAGTGTA
TGCGGCGACCGAGTTGCTCTTGCCCGGCGTCAATACGGGATAATA
CCGCGCCACATAGCAGAACTTTAAAAGTGCTCATCATTGGAAAAC
GTTCTTCGGGGCGAAAACTCTCAAGGATCTTACCGCTGTTGAGAT
CCAGTTCGATGTAACCCACTCGTGCACCCAACTGATCTTCAGCAT
CTTTTACTTTCACCAGCGTTTCTGGGTGAGCAAAAACAGGAAGGC
AAAATGCCGCAAAAAAGGGAATAAGGGCGACACGGAAATGTTGAA
TACTCATACTCTTCCTTTTTCAATATTATTGAAGCATTTATCAGG
GTTATTGTCTCATGAGCGGATACATACGCGAGGCCATATGGGTTA
ACTTTGCTTCCTCTGGGGTAGCAGACACCTCAGCA

[0351] The ART-21-101_pUCmu-gTRBC1-DSG3-EC1-3 donor template for knock in of the CAAR at the TRBC1/2 locus is shown below with the DSG3 CAAR sequence in bold:

CGCGTATTGGGATCCTCAGCAAAGGAAAATTATAATTAGAAAAAG
TCAATTTAGTTATTGTAATTATACCACTAATGAGAGTTTCCTACC
TCGAGTTTCAGGATTACATAGCCATGCACCAAGCAAGGCTTTGAA
AAATAAAGATACACAGATAAATTATTTGGATAGATGATCAGACAA
GCCTCAGTAAAAACAGCCAAGACAATCAGGATATAATGTGACCAT
AGGAAGCTGGGGAGACAGTAGGCAATGTGCATCCATGGGACAGCA
TAGAAAGGAGGGGCAAAGTGGAGAGAGAGCAACAGACACTGGGAT
GGTGACCCCAAAACAATGAGGGCCTAGAATGACATAGTTGTGCTT
CATTACGGCCCATTCCCAGGGCTCTCTCTCACACACACAGAGCCC
CTACCAGAACCAGACAGCTCTCAGAGCAACCCTGGCTCCAACCCC
TCTTCCCTTTCCAGAGGACCTGAACAAGGTGTTCCCACCCGAGGT
CGCTGTGTTTGAGCCATCAGAAGCACGTGAGGCTCCGGTGCCCGT
CAGTGGGCAGAGCGCACATCGCCCACAGTCCCCGAGAAGTTGGGG
GGAGGGGTCGGCAATTGAACCGGTGCCTAGAGAAGGTGGCGCGGG
GTAAACTGGGAAAGTGATGTCGTGTACTGGCTCCGCCTTTTTCCC
GAGGGTGGGGGAGAACCGTATATAAGTGCAGTAGTCGCCGTGAAC
GTTCTTTTTCGCAACGGGTTTGCCGCCAGAACACAGGTAAGTGCC
GTGTGTGGTTCCCGCGGGCCTGGCCTCTTTACGGGTTATGGCCCT
TGCGTGCCTTGAATTACTTCCACCTGGCTGCAGTACGTGATTCTT
GATCCCGAGCTTCGGGTTGGAAGTGGGTGGGAGAGTTCGAGGCCT
TGCGCTTAAGGAGCCCCTTCGCCTCGTGCTTGAGTTGAGGCCTGG
CCTGGGCGCTGGGGCCGCCGCGTGCGAATCTGGTGGCACCTTCGC
GCCTGTCTCGCTGCTTTCGATAAGTCTCTAGCCATTTAAAATTTT
TGATGACCTGCTGCGACGCTTTTTTTCTGGCAAGATAGTCTTGTA
AATGCGGGCCAAGATCTGCACACTGGTATTTCGGTTTTTGGGGCC
GCGGGCGGCGACGGGGCCCGTGCGTCCCAGCGCACATGTTCGGCG
AGGCGGGGCCTGCGAGCGCGGCCACCGAGAATCGGACGGGGGTAG
TCTCAAGCTGGCCGGCCTGCTCTGGTGCCTGGCCTCGCGCCGCCG
TGTATCGCCCCGCCCTGGGCGGCAAGGCTGGCCCGGTCGGCACCA
GTTGCGTGAGCGGAAAGATGGCCGCTTCCCGGCCCTGCTGCAGGG
AGCTCAAAATGGAGGACGCGGCGCTCGGGAGAGCGGGCGGGTGAG
TCACCCACACAAAGGAAAAGGGCCTTTCCGTCCTCAGCCGTCGCT
TCATGTGACTCCACTGAGTACCGGGCGCCGTCCAGGCACCTCGAT
TAGTTCTCGTGCTTTTGGAGTACGTCGTCTTTAGGTTGGGGGGAG
GGGTTTTATGCGATGGAGTTTCCCCACACTGAGTGGGTGGAGACT
GAAGTTAGGCCAGCTTGGCACTTGATGTAATTCTCCTTGGAATTT
GCCCTTTTTGAGTTTGGATCTTGGTTCATTCTCAAGCCTCAGACA
GTGGTTCAAAGTTTTTTTCTTCCATTTCAGGTGTCGTGAGCTAGA
GCCACCATGGAGTTTGGGCTGAGCTGGCTTTTTCTTGTGGCTATT
TTAAAAGGTGTCCAGTGCGGATCCGAGCTGCGGATCGAGACAAAG
GGCCAGTACGACGAGGAAGAGATGACAATGCAGCAGGCCAAGCGG
CGGCAGAAACGCGAGTGGGTCAAGTTCGCCAAGCCCTGCAGAGAG
GGCGAGGACAACAGCAAGCGGAACCCTATCGCCAAGATCACCAGC
GACTACCAGGCCACCCAGAAGATCACCTACCGGATCAGCGGCGTG
GGCATCGACCAGCCCCCTTTCGGCATCTTCGTGGTGGACAAGAAC
ACCGGCGACATCAACATCACCGCCATCGTGGACAGAGAGGAAACC
CCCAGCTTCCTGATCACCTGTCGGGCCCTGAATGCCCAGGGCCTG
GACGTGGAAAAGCCCCTGATCCTGACCGTGAAGATCCTGGACATC
AACGACAACCCCCCCGTGTTCAGCCAGCAGATCTTCATGGGCGAG
ATCGAGGAAAACAGCGCCAGCAACAGCCTCGTGATGATCCTGAAC
GCCACCGACGCCGACGAGCCCAACCACCTGAATAGCAAGATCGCC
TTCAAGATCGTGTCCCAGGAACCCGCCGGAACCCCCATGTTCCTG
CTGAGCAGAAATACCGGCGAAGTGCGGACCCTGACCAACAGCCTG
GATAGAGAGCAGGCCAGCAGCTACCGGCTGGTGGTGTCTGGCGCT
GACAAGGATGGCGAGGGCCTGAGCACACAGTGCGAGTGCAACATC
AAAGTGAAGGACGTGAACGACAACTTCCCTATGTTCCGGGACAGC
CAGTACAGCGCCCGGATCGAAGAGAACATCCTGAGCAGCGAGCTG
CTGCGGTTCCAAGTGACCGACCTGGACGAAGAGTACACCGACAAC
TGGCTGGCCGTGTACTTCTTCACCAGCGGCAACGAGGGCAATTGG
TTCGAGATCCAGACCGACCCCCGGACCAATGAGGGCATCCTGAAG
GTCGTGAAGGCCCTGGACTACGAGCAGCTGCAGAGCGTGAAGCTG
TCTATCGCCGTGAAGAACAAGGCCGAGTTCCACCAGTCCGTGATC
AGCCGGTACAGAGTGCAGAGCACCCCCGTGACCATCCAAGTGATC
AACGTGCGCGAGGGCATTGCCTTCGCTAGCGGTGGCGGAGGTTCT
GGAGGTGGAGGTTCCTCCGGAATCTACATCTGGGCGCCCTTGGCC
GGGACTTGTGGGGTCCTTCTCCTGTCACTGGTTATCACCCTTTAC
TGCAAACGGGGCAGAAAGAAACTCCTGTATATATTCAAACAACCA
TTTATGAGACCAGTACAAACTACTCAAGAGGAAGATGGCTGTAGC
TGCCGATTTCCAGAAGAAGAAGAAGGAGGATGTGAACTGAGAGTG
AAGTTCAGCAGGAGCGCAGACGCCCCCGCGTACCAGCAGGGCCAG
AACCAGCTCTATAACGAGCTCAATCTAGGACGAAGAGAGGAGTAC
GATGTTTTGGACAAGAGACGTGGCCGGGACCCTGAGATGGGGGGA
AAGCCGAGAAGGAAGAACCCTCAGGAAGGCCTGTACAATGAACTG
CAGAAAGATAAGATGGCGGAGGCCTACAGTGAGATTGGGATGAAA
GGCGAGCGCCGGAGGGGCAAGGGGCACGATGGCCTTTACCAGGGT
CTCAGTACAGCCACCAAGGACACCTACGACGCCCTTCACATGCAG
GCCCTGCCCCCTCGCTAAGTCGACAATCAACCTCTGGATTACAAA
ATTTGTGAAAGATTGACTGGTATTCTTAACTATGTTGCTCCTTTT
ACGCTATGTGGATACGCTGCTTTAATGCCTTTGTATCATGCTATT
GCTTCCCGTATGGCTTTCATTTTCTCCTCCTTGTATAAATCCTGG
TTGCTGTCTCTTTATGAGGAGTTGTGGCCCGTTGTCAGGCAACGT
GGCGTGGTGTGCACTGTGTTTGCTGACGCAACCCCCACTGGTTGG
GGCATTGCCACCACCTGTCAGCTCCTTTCCGGGACTTTCGCTTTC
CCCCTCCCTATTGCCACGGCGGAACTCATCGCCGCCTGCCTTGCC
CGCTGCTGGACAGGGGCTCGGCTGTTGGGCACTGACAATTCCGTG
GTGTTGTCGGGGAAGCTGACGTCCTTTCCTTGGCTGCTCGCCTGT
GTTGCCACCTGGATTCTGCGCGGGACGTCCTTCTGCTACGTCCCT
TCGGCCCTCAATCCAGCGGACCTTCCTTCCCGCGGCCTGCTGCCG
GCTCTGCGGCCTCTTCCGCGTCTTCGCCTTCGCCCTCAGACGAGT
CGGATCTCCCTTTGGGCCGCCTCCCCGCCTGCGACTGTGCCTTCT
AGTTGCCAGCCATCTGTTGTTTGCCCCTCCCCCGTGCCTTCCTTG
ACCCTGGAAGGTGCCACTCCCACTGTCCTTTCCTAATAAAATGAG
GAAATTGCATCGCATTGTCTGAGTAGGTGTCATTCTATTCTGGGG
GGTGGGGTGGGGCAGGACAGCAAGGGGGAGGATTGGGAAGACAAT
AGCAGGCATGCTGGGGATGCGGTGGGCTCTATGGGAGATCTCCCA
CACCCAAAAGGCCACACTGGTGTGCCTGGCCACAGGCTTCTTCCC
TGACCACGTGGAGCTGAGCTGGTGGGTGAATGGGAAGGAGGTGCA
CAGTGGGGTCAGCACGGACCCGCAGCCCCTCAAGGAGCAGCCCGC
CCTCAATGACTCCAGATACTGCCTGAGCAGCCGCCTGAGGGTCTC
GGCCACCTTCTGGCAGAACCCCCGCAACCACTTCCGCTGTCAAGT
CCAGTTCTACGGGCTCTCGGAGAATGACGAGTGGACCCAGGATAG
GGCCAAACCCGTCACCCAGATCGTCAGCGCCGAGGCCTGGGGTAG
AGCAGGTGAGTGGGGCCTGGGGAGATGCCTGGAGGAGATTAGGTG
AGACCAGCTACCAGGGAAAATGGAAAGATCCAGGTAGCAGACAAG
ACTAGATCCAAAAAGAAAGGAACCAGCGCACACCATGAAGGAGAA
TTGGGCACCTGTGGTTCATTCTTCTCCCAGATTCTCAGCGCGGCC
GCAGATCTCTGCTTCTGATGGCTCAAACAGGTCGACTCTAGAGGA
TCCCGGGTACCGAGCTCGAATTCGGATATCCTCGAGACTAGTGGG
CCCGTTTAAACACATGTGTTTTTCCATAGGCTCCGCCCCCCTGAC
GAGCATCACAAAAATCGACGCTCAAGTCAGAGGTGGCGAAACCCG
ACAGGACTATAAAGATACCAGGCGTTTCCCCCTGGAAGCTCCCTC
GTGCGCTCTCCTGTTCCGACCCTGCCGCTTACCGGATACCTGTCC
GCCTTTCTCCCTTCGGGAAGCGTGGCGCTTTCTCATAGCTCACGC
TGTAGGTATCTCAGTTCGGTGTAGGTCGTTCGCTCCAAGCTGGGC
TGTGTGCACGAACCCCCCGTTCAGCCCGACCGCTGCGCCTTATCC
GGTAACTATCGTCTTGAGTCCAACCCGGTAAGACACGACTTATCG
CCACTGGCAGCAGCCACTGGTAACAGGATTAGCAGAGCGAGGTAT
GTAGGCGGTGCTACAGAGTTCTTGAAGTGGTGGCCTAACTACGGC
TACACTAGAAGAACAGTATTTGGTATCTGCGCTCTGCTGAAGCCA
GTTACCTTCGGAAAAAGAGTTGGTAGCTCTTGATCCGGCAAACAA
ACCACCGCTGGTAGCGGTGGTTTTTTTGTTTGCAAGCAGCAGATT
ACGCGCAGAAAAAAAGGATCTCAAGAAGATCCTTTGATCTTTTCT
ACTACCAATGCTTAATCAGTGAGGCACCTATCTCAGCGATCTGTC
TATTTCGTTCATCCATAGTTGCCTGACTCCCCGTCGTGTAGATAA
CTACGATACGGGAGGGCTTACCATCTGGCCCCAGTGCTGCAATGA
TACCGCGAGACCCACGCTCACCGGCTCCAGATTTATCAGCAATAA
ACCAGCCAGCCGGAAGGGCCGAGCGCAGAAGTGGTCCTGCAACTT
TATCCGCCTCCATCCAGTCTATTAATTGTTGCCGGGAAGCTAGAG
TAAGTAGTTCGCCAGTTAATAGTTTGCGCAACGTTGTTGCCATTG
CTACAGGCATCGTGGTGTCACGCTCGTCGTTTGGTATGGCTTCAT
TCAGCTCCGGTTCCCAACGATCAAGGCGAGTTACATGATCCCCCA
TGTTGTGCAAAAAAGCGGTTAGCTCCTTCGGTCCTCCGATCGTTG
TCAGAAGTAAGTTGGCCGCAGTGTTATCACTCATGGTTATGGCAG
CACTGCATAATTCTCTTACTGTCATGCCATCCGTAAGATGCTTTT
CTGTGACTGGTGAGTACTCAACCAAGTCATTCTGAGAATAGTGTA
TGCGGCGACCGAGTTGCTCTTGCCCGGCGTCAATACGGGATAATA
CCGCGCCACATAGCAGAACTTTAAAAGTGCTCATCATTGGAAAAC
GTTCTTCGGGGCGAAAACTCTCAAGGATCTTACCGCTGTTGAGAT
CCAGTTCGATGTAACCCACTCGTGCACCCAACTGATCTTCAGCAT
CTTTTACTTTCACCAGCGTTTCTGGGTGAGCAAAAACAGGAAGGC
AAAATGCCGCAAAAAAGGGAATAAGGGCGACACGGAAATGTTGAA
TACTCATACTCTTCCTTTTTCAATATTATTGAAGCATTTATCAGG
GTTATTGTCTCATGAGCGGATACATACGCGAGGCCATATGGGTTA
ACTTTGAGCCATCAGAAGCAGAGATCTCCTCAGCA

[0352] Five controls were used for the experiment: (1) wild-type Jurkat cells (WT Jurkat, negative control), (2) Pan T-cells transfected with no donor template (No Cargo Ctrl, negative control), (3) Pan T-cells without electroporation (No NF Ctrl, negative control); (4) DSG3-displaying Jurkat cells (DSG3-Jurkat, positive control); and (5) PDS-20-010 cells displaying DSG3 (positive control).

[0353] To functionally analyze the editing outcome, we used antibody staining of the cells and flowcytometry to determine the negative cell population of the edited protein coding gene. Briefly, 1,000,000 cells/ml were harvested and washed with Cell Staining Buffer (Biolegend, catalog #420201), incubated with a fluorophore tagged antibody (either primary human anti-DSG3 diluted to 1:100 and secondary anti-human IgG-AG647 diluted 1:1000 or primary mouse anti-DSG3 diluted to 1:50 and secondary anti-mouse IgG-PE diluted 1:1000) against the protein of interest or an indirect marker for the protein of interest, washed with Cell Staining Buffer (Biolegend, catalog #420201), resuspended in 1×PBS and analyzed by Flowcytometry. The data were analyzed using Flowjo, gated for viable, single cells and the negative cell population of the stained protein were determined. The percent of DSG3 positive cells (comprising the CAAR) in a population is plotted for each treatment condition as shown in FIG. 6, with the mouse primary and secondary shown in black and the human primary and second shown in gray. A no gRNA control sample was also tested for each of the three surface markers shown as the far right bar. KI efficiency of DSG3 CAAR as measured by the percentage of the recovered population of using MAD7 in combination with gTRBC1_2_003/ART-21-101 and gCD3E_34/ART-21-100 was between ˜5-20%. Cell counts were further measured daily after nucleofection. Day 7 expansion data is shown in FIG. 7 for each treatment condition. Notably, the fold expansion was on average similar across Nucleofected samples. High DSG3 CAAR expressing treatment conditions (B2 and C2 using gCD3_34/ART-21-100) demonstrates lower fold expansion than those treatment conditions showing lower DSG3 CAAR expression.

[0354] This example further demonstrates the use of the TRBC1/2 and CD3E sites for integration of heterologous genes.

### EQUIVALENTS

[0355] The invention may be embodied in other specific forms without departing from the spirit or essential characteristics thereof. The foregoing embodiments are therefore to be considered in all respects illustrative rather than limiting on the invention described herein. Scope of the invention is thus indicated by the appended claims rather than by the foregoing description, and all changes that come within the meaning and range of equivalency of the claims are intended to be embraced therein.

1. A guide nucleic acid comprising a targeter stem sequence and a spacer sequence, wherein the spacer sequence comprises a nucleotide sequence listed in Table 1, 2, 3, 4, 5, 6, 7, 8, 9, 14, 15, 16, 17, 18, 19, or 20.

2. The guide nucleic acid of claim 1, wherein the targeter stem sequence comprises a nucleotide sequence of GUAGA.

3. The guide nucleic acid of claim 1, wherein the targeter stem sequence is 5′ to the spacer sequence, optionally wherein the targeter stem sequence is linked to the spacer sequence by a linker consisting of 1, 2, 3, 4, or 5 nucleotides.

4. The guide nucleic acid of claim 1, wherein the guide nucleic acid is capable of activating a CRISPR Associated (Cas) nuclease in the absence of a tracrRNA, optionally wherein the Cas nuclease recognizes a protospacer adjacent motif (PAM) consisting of the nucleotide sequence of TTTN or CTTN.

5. The guide nucleic acid of claim 4, wherein the guide nucleic acid comprises from 5′ to 3′ a modulator stem sequence, a loop sequence, a targeter stem sequence, and the spacer sequence.

6. The guide nucleic acid of claim 1, wherein the guide nucleic acid is a targeter nucleic acid that, in combination with a modulator nucleic acid, is capable of activating a Cas nuclease.

7. The guide nucleic acid of claim 6, wherein the guide nucleic acid comprises from 5′ to 3′ a targeter stem sequence and the spacer sequence.

8. The guide nucleic acid of claim 4, wherein the Cas nuclease is a type V Cas nuclease, optionally a type V-A Cas nuclease.

9. (canceled)

10. The guide nucleic acid of claim 9, wherein the Cas nuclease comprises an amino acid sequence at least 80% identical to SEQ ID NO: 1 or wherein the Cas nuclease is Cpf1.

11.-12. (canceled)

13. The guide nucleic acid of claim 1, wherein the guide nucleic acid comprises a ribonucleic acid (RNA) or a combination of RNA and DNA, optionally wherein the RNA is modified RNA.

14.-15. (canceled)

16. The guide nucleic acid of claim 13, wherein the guide nucleic acid comprises a chemical modification, optionally wherein:
the chemical modification is present in one or more nucleotides at the 5′ end of the guide nucleic acid and/or in one or more nucleotides at the 3′ end of the guide nucleic acid; and/or
the chemical modification is selected from the group consisting of 2′-O-methyl, 2′-fluoro, 2′-O-methoxyethyl, phosphorothioate, phosphorodithioate, pseudouridine, and any combinations thereof.

17.-19. (canceled)

20. An engineered, non-naturally occurring system comprising the guide nucleic acid of claim 4.

21. The engineered, non-naturally occurring system of claim 20, further comprising the Cas nuclease, optionally wherein the guide nucleic acid and the Cas nuclease are present in a ribonucleoprotein (RNP) complex.

22. (canceled)

23. An engineered, non-naturally occurring system comprising the guide nucleic acid of claim 6, further comprising the modulator nucleic acid.

24. The engineered, non-naturally occurring system of claim 23, further comprising the Cas nuclease, optionally wherein the guide nucleic acid, the modulator nucleic acid, and the Cas nuclease are present in an RNP complex.

25. (canceled)

26. The engineered, non-naturally occurring system of claim 20, wherein the spacer sequence comprises a nucleotide sequence selected from the group consisting of:
SEQ ID NOs: 201-253, wherein the spacer sequence is capable of hybridizing with the human CSF2 gene;
SEQ ID NOs: 254-313, wherein the spacer sequence is capable of hybridizing with the human CD40LG gene;
SEQ ID NOs: 314-319 and 329-332, wherein the spacer sequence is capable of hybridizing with the human TRBC1 gene;
SEQ ID NOs: 320-328 and 329-332, wherein the spacer sequence is capable of hybridizing with the human TRBC2 gene;
SEQ ID NOs: 329-332, wherein the spacer sequence is capable of hybridizing with both the human TRBC1 gene and the human TRBC2 gene;
SEQ ID NOs: 333-374, wherein the spacer sequence is capable of hybridizing with the human CD3E gene;
SEQ ID NOs: 375-411, wherein the spacer sequence is capable of hybridizing with the human CD38 gene;
SEQ ID NOs: 412-421, wherein the spacer sequence is capable of hybridizing with the human APLNR gene;
SEQ ID NOs: 422-431, wherein the spacer sequence is capable of hybridizing with the human BBS1 gene;
SEQ ID NOs: 432-441, wherein the spacer sequence is capable of hybridizing with the human CALR gene;
SEQ ID NOs: 442-451, wherein the spacer sequence is capable of hybridizing with the human CD247 gene;
SEQ ID NOs: 452-461, wherein the spacer sequence is capable of hybridizing with the human CD3G gene;
SEQ ID NOs: 462-465, wherein the spacer sequence is capable of hybridizing with the human CD52 gene;
SEQ ID NOs: 476-485, wherein the spacer sequence is capable of hybridizing with the human COL17A1;
SEQ ID NOs: 486-495, wherein the spacer sequence is capable of hybridizing with the human DEFB134 gene;
SEQ ID NOs: 496-505, wherein the spacer sequence is capable of hybridizing with the human ERAP1 gene;
SEQ ID NOs: 506-515, wherein the spacer sequence is capable of hybridizing with the human ERAP2 gene;
SEQ ID NOs: 516-525, wherein the spacer sequence is capable of hybridizing with the human IFNGR1 gene;
SEQ ID NOs: 526-535, wherein the spacer sequence is capable of hybridizing with the human IFNGR2 gene;
SEQ ID NOs: 536-545, wherein the spacer sequence is capable of hybridizing with the human JAK1 gene;
SEQ ID NOs: 546-555, wherein the spacer sequence is capable of hybridizing with the human JAK2 gene;
SEQ ID NOs: 556-558, wherein the spacer sequence is capable of hybridizing with the human mir-101-2 gene;
SEQ ID NOs: 559-568, wherein the spacer sequence is capable of hybridizing with the human MLANA gene;
SEQ ID NOs: 569-578, wherein the spacer sequence is capable of hybridizing with the human PSMB5 gene;
SEQ ID NOs: 579-588, wherein the spacer sequence is capable of hybridizing with the human PSMB8 gene;
SEQ ID NOs: 589-598, and wherein the spacer sequence is capable of hybridizing with the human PSMB9 gene;
SEQ ID NOs: 599-608, wherein the spacer sequence is capable of hybridizing with the human PTCD2 gene;
SEQ ID NOs: 609-618, wherein the spacer sequence is capable of hybridizing with the human RFX5 gene;
SEQ ID NOs: 619-628, wherein the spacer sequence is capable of hybridizing with the human RFXANK gene;
SEQ ID NOs: 629-638, wherein the spacer sequence is capable of hybridizing with the human RFXAP gene;
SEQ ID NOs: 639-648, wherein the spacer sequence is capable of hybridizing with the human RPL23 gene;
SEQ ID NOs: 649-654, wherein the spacer sequence is capable of hybridizing with the human SOX10 gene;
SEQ ID NOs: 655-665, wherein the spacer sequence is capable of hybridizing with the human SRP54 gene;
SEQ ID NOs: 666-675, wherein the spacer sequence is capable of hybridizing with the human STAT1 gene;
SEQ ID NOs: 676-685, wherein the spacer sequence is capable of hybridizing with the human Tap1 gene;
SEQ ID NOs: 686-695, wherein the spacer sequence is capable of hybridizing with the human Tap2 gene;
SEQ ID NOs: 696-705, wherein the spacer sequence is capable of hybridizing with the human TAPBP gene;
SEQ ID NOs: 706-715, wherein the spacer sequence is capable of hybridizing with the human TFW1 gene;
SEQ ID NOs: 716-725, wherein the spacer sequence is capable of hybridizing with the human CD3D gene; and
SEQ ID NOs: 726-744, wherein the spacer sequence is capable of hybridizing with the human NLRC5 gene.

27. The engineered, non-naturally occurring system of claim 26, wherein, when the system is delivered into a population of human cells ex vivo, the genomic sequence at the CSF2 gene locus, the CD40LG gene locus, the TRBC1 gene locus, the TRBC2 gene locus, both the TRBC1 and TRBC2 gene locus, the CD3E gene locus, the CD38 gene locus, the APLNR gene locus, the BBS1 gene locus, the CALR gene locus, the CD247 gene locus, the CD3G gene locus, the CD52 gene locus, the CD58 gene locus, the COL17A1 gene locus, the DEFB134 gene locus, the ERAP1 gene locus, the ERAP2 gene locus, the IFNGR1 gene locus, the IFNGR2 gene locus, the JAK1 gene locus, the JAK2 gene locus, the mir-101-2 gene locus, the MLANA gene locus, the PSMB5 gene locus, the PSMB8 gene locus, the PSMB9 gene locus, the PTCD2 gene locus, the RFX5 gene locus, the RFXANK gene locus, the RFXAP gene locus, the RPL23 gene locus, the SOX10 gene locus, the SRP54 gene locus, the STAT1 gene locus, the Tap1 gene locus, the Tap2 gene locus, the TAPBP gene locus, the TFW1 gene locus, the CD3D gene locus, or the NLRC5 gene locus, is edited in at least 1.5% of the cells.

28.-107. (canceled)

108. The engineered, non-naturally occurring system of claim 20, wherein genomic mutations are detected in no more than 2%, optionally no more than 1%, of the cells at any off-target loci by CIRCLE-Seq.

109.-115. (canceled)

116. A method of editing human genomic sequence at a preselected target gene locus, the method comprising delivering the engineered, non-naturally occurring system of claim 20 into a human cell, thereby resulting in editing of the genomic sequence at the target gene locus in the human cell.

117. The method of claim 116, wherein the cell is an immune cell, optionally wherein the immune cell is a T lymphocyte.

118. (canceled)

119. The method of claim 116, the method comprising delivering the engineered, non-naturally occurring system comprising a guide nucleic acid that is capable of activating a CRISPR Associated (Cas) nuclease in the absence of a tracrRNA, optionally wherein the Cas nuclease recognizes a protospacer adjacent motif (PAM) consisting of the nucleotide sequence of TTTN or CTTN of into a population of human cells, thereby resulting in editing of the genomic sequence at the target gene locus in at least a portion of the human cells.

120. The method of claim 119, wherein the population of human cells comprises human immune cells, optionally wherein:
the population of human cells is an isolated population of human immune cells; and/or
the immune cells are T lymphocytes.

121.-122. (canceled)

123. The method of claim 119, wherein editing of the genomic sequence at the target gene locus results in lowered expression of the target gene, optionally less than 80%, 70%, 60%, or 50% of the expression of the endogenous gene relative to a corresponding unmodified or parental cell.

124.-127. (canceled)

128. The method of claim 116, wherein the engineered, non-naturally occurring system is delivered into the cell(s) as a pre-formed RNP complex, optionally wherein the pre-formed RNP complex is delivered into the cell(s) by electroporation.

129. (canceled)

130. The method of claim 116, wherein the target gene is selected from the group consisting of:
human CSF2 gene, and the spacer sequence comprises a nucleotide sequence selected from the group consisting of SEQ ID NOs: 201-253;
human CD40LG gene, and the spacer sequence comprises a nucleotide sequence selected from the group consisting of SEQ ID NOs: 254-313;
human TRBC1 gene, and the spacer sequence comprises a nucleotide sequence selected from the group consisting of SEQ ID NOs: 314-319 and 329-332;
human TRBC2 gene, and the spacer sequence comprises a nucleotide sequence selected from the group consisting of SEQ ID NOs: 320-328 and 329-332;
both the human TRBC1 gene and the human TRBC2 gene, and the spacer sequence comprises a nucleotide sequence selected from the group consisting of SEQ ID NOs: 329-332;
human CD3E gene, and the spacer sequence comprises a nucleotide sequence selected from the group consisting of SEQ ID NOs: 333-374;
human CD38 gene, and the spacer sequence comprises a nucleotide sequence selected from the group consisting of SEQ ID NOs: 375-411;
human APLNR gene, and the spacer sequence comprises a nucleotide sequence selected from the group consisting of SEQ ID NOs: 412-421;
human BBS1 gene, and the spacer sequence comprises a nucleotide sequence selected from the group consisting of SEQ ID NOs: 422-431;
human CALR gene, and the spacer sequence comprises a nucleotide sequence selected from the group consisting of SEQ ID NOs: 432-441;
human CALR gene, and the spacer sequence comprises a nucleotide sequence selected from the group consisting of SEQ ID NOs: 432-441;
human CD247 gene, and the spacer sequence comprises a nucleotide sequence selected from the group consisting of SEQ ID NOs: 442-451;
human CD3G gene, and the spacer sequence comprises a nucleotide sequence selected from the group consisting of SEQ ID NOs: 452-461;
human CD52 gene, and the spacer sequence comprises a nucleotide sequence selected from the group consisting of SEQ ID NOs: 462-465;
human CD58 gene, and the spacer sequence comprises a nucleotide sequence selected from the group consisting of SEQ ID NOs: 466-475;
human COL17A1 gene, and the spacer sequence comprises a nucleotide sequence selected from the group consisting of SEQ ID NOs: 476-485;
human DEFB134 gene, and the spacer sequence comprises a nucleotide sequence selected from the group consisting of SEQ ID NOs: 486-495;
human ERAP1 gene, and the spacer sequence comprises a nucleotide sequence selected from the group consisting of SEQ ID NOs: 496-505;
human ERAP2 gene, and the spacer sequence comprises a nucleotide sequence selected from the group consisting of SEQ ID NOs: 506-515;
human IFNGR1 gene, and the spacer sequence comprises a nucleotide sequence selected from the group consisting of SEQ ID NOs: 516-525;
human IFNGR2 gene, and the spacer sequence comprises a nucleotide sequence selected from the group consisting of SEQ ID NOs: 526-535;
human JAK1 gene, and the spacer sequence comprises a nucleotide sequence selected from the group consisting of SEQ ID NOs: 536-545;
human JAK2 gene, and the spacer sequence comprises a nucleotide sequence selected from the group consisting of SEQ ID NOs: 546-555;
human mir-101-2 gene, and the spacer sequence comprises a nucleotide sequence selected from the group consisting of SEQ ID NOs: 556-558;
human MLANA gene, and the spacer sequence comprises a nucleotide sequence selected from the group consisting of SEQ ID NOs: 559-568;
human PSMB5 gene, and the spacer sequence comprises a nucleotide sequence selected from the group consisting of SEQ ID NOs: 569-578;
PSMB8 gene, and the spacer sequence comprises a nucleotide sequence selected from the group consisting of SEQ ID NOs: 579-588;
PSMB9 gene, and the spacer sequence comprises a nucleotide sequence selected from the group consisting of SEQ ID NOs: 589-598;
human PTCD2 gene, and the spacer sequence comprises a nucleotide sequence selected from the group consisting of SEQ ID NOs: 599-608;
human RFX5 gene, and the spacer sequence comprises a nucleotide sequence selected from the group consisting of SEQ ID NOs: 609-618;
human RFXANK gene, and the spacer sequence comprises a nucleotide sequence selected from the group consisting of SEQ ID NOs: 619-628;
human RFXAP gene, and the spacer sequence comprises a nucleotide sequence selected from the group consisting of SEQ ID NOs: 629-638;
human RPL23 gene, and the spacer sequence comprises a nucleotide sequence selected from the group consisting of SEQ ID NOs: 639-648;
SOX10 gene, and the spacer sequence comprises a nucleotide sequence selected from the group consisting of SEQ ID NOs: 649-654;
human SRP54 gene, and the spacer sequence comprises a nucleotide sequence selected from the group consisting of SEQ ID NOs: 655-665;
human STAT1 gene, and the spacer sequence comprises a nucleotide sequence selected from the group consisting of SEQ ID NOs: 666-675;
human Tap1 gene, and the spacer sequence comprises a nucleotide sequence selected from the group consisting of SEQ ID NOs: 676-685;
human TAP2 gene, and the spacer sequence comprises a nucleotide sequence selected from the group consisting of SEQ ID NOs: 686-695;
human TAPBP gene, and the spacer sequence comprises a nucleotide sequence selected from the group consisting of SEQ ID NOs: 696-705;
human TWF1 gene, and the spacer sequence comprises a nucleotide sequence selected from the group consisting of SEQ ID NOs: 706-715;
human CD3D gene, and the spacer sequence comprises a nucleotide sequence selected from the group consisting of SEQ ID NOs: 716-725; and
human NLRC2 gene, and the spacer sequence comprises a nucleotide sequence selected from the group consisting of SEQ ID NOs: 726-744.

131.-211. (canceled)

212. The method of claim 116, wherein genomic mutations are detected in no more than 2%, optionally no more than 1%, of the cells at any off-target loci by CIRCLE-Seq.

213. (canceled)

The application's sequence listing, which the Patent Office published only in electronic form, follows.

SEQUENCE LISTING (999 sequences)

SEQ ID NO: 1 - protein, 1263 aa, Artificial Sequence
  Description of Artificial Sequence: Synthetic polypeptide
MNNGTNNFQNFIGISSLQKTLRNALIPTETTQQFIVKNGIIKEDELRGENRQILKDIMDDYYRGFISETLSSIDDIDWTSLFEKMEIQLKNGDNKDTLIKEQTEYRKAIHKKFANDDRFKNMFSAKLISDILPEFVIHNNNYSASEKEEKTQVIKLFSRFATSFKDYFKNRANCFSADDISSSSCHRIVNDNAEIFFSNALVYRRIVKSLSNDDINKISGDMKDSLKEMSLEEIYSYEKYGEFITQEGISFYNDICGKVNSFMNLYCQKNKENKNLYKLQKLHKQILCIADTSYEVPYKFESDEEVYQSVNGFLDNISSKHIVERLRKIGDNYNGYNLDKIYIVSKFYESVSQKTYRDWETINTALEIHYNNILPGNGKSKADKVKKAVKNDLQKSITEINELVSNYKLCSDDNIKAETYIHEISHILNNFEAQELKYNPEIHLVESELKASELKNVLDVIMNAFHWCSVFMTEELVDKDNNFYAELEEIYDEIYPVISLYNLVRNYVTQKPYSTKKIKLNFGIPTLADGWSKSKEYSNNAIILMRDNLYYLGIFNAKNKPDKKIIEGNTSENKGDYKKMIYNLLPGPNKMIPKVFLSSKTGVETYKPSAYILEGYKQNKHIKSSKDFDITFCHDLIDYFKNCIAIHPEWKNFGFDFSDTSTYEDISGFYREVELQGYKIDWTYISEKDIDLLQEKGQLYLFQIYNKDFSKKSTGNDNLHTMYLKNLFSEENLKDIVLKLNGEAEIFFRKSSIKNPIIHKKGSILVNRTYEAEEKDQFGNIQIVRKNIPENIYQELYKYFNDKSDKELSDEAAKLKNVVGHHEAATNIVKDYRYTYDKYFLHMPITINFKANKTGFINDRILQYIAKEKDLHVIGIDRGERNLIYVSVIDTCGNIVEQKSFNIVNGYDYQIKLKQQEGARQIARKEWKEIGKIKEIKEGYLSLVIHEISKMVIKYNAIIAMEDLSYGFKKGRFKVERQVYQKFETMLINKLNYLVFKDISITENGGLLKGYQLTYIPDKLKNVGHQCGCIFYVPAAYTSKIDPTTGFVNIFKFKDLTVDAKREFIKKFDSIRYDSEKNLFCFTFDYNNFITQNTVMSKSSWSVYTYGVRIKRRFVNGRFSNESDTIDITKDMEKTLEMTDINWRDGHDLRQDIIDYEIVQHIFEIFRLTVQMRNSLSELEDRDYDRLISPVLNENNIFYDSAKAGDALPKDADANGAYCIALKGLYEIKQITENWKEDGKFSRDKLKISNKDWFDFIQNKRYL

SEQ ID NO: 2 - protein, 1334 aa, Artificial Sequence
  Description of Artificial Sequence: Synthetic polypeptide
MSSLTKFTNKYSKQLTIKNELIPVGKTLENIKENGLIDGDEQLNENYQKAKIIVDDFLRDFINKALNNTQIGNWRELADALNKEDEDNIEKLQDKIRGIIVSKFETFDLFSSYSIKKDEKIIDDDNDVEEEELDLGKKTSSFKYIFKKNLFKLVLPSYLKTTNQDKLKIISSFDNFSTYFRGFFENRKNIFTKKPISTSIAYRIVHDNFPKFLDNIRCFNVWQTECPQLIVKADNYLKSKNVIAKDKSLANYFTVGAYDYFLSQNGIDFYNNIIGGLPAFAGHEKIQGLNEFINQECQKDSELKSKLKNRHAFKMAVLFKQILSDREKSFVIDEFESDAQVIDAVKNFYAEQCKDNNVIFNLLNLIKNIAFLSDDELDGIFIEGKYLSSVSQKLYSDWSKLRNDIEDSANSKQGNKELAKKIKTNKGDVEKAISKYEFSLSELNSIVHDNTKFSDLLSCTLHKVASEKLVKVNEGDWPKHLKNNEEKQKIKEPLDALLEIYNTLLIFNCKSFNKNGNFYVDYDRCINELSSVVYLYNKTRNYCTKKPYNTDKFKLNFNSPQLGEGFSKSKENDCLTLLFKKDDNYYVGIIRKGAKINFDDTQAIADNTDNCIFKMNYFLLKDAKKFIPKCSIQLKEVKAHFKKSEDDYILSDKEKFASPLVIKKSTFLLATAHVKGKKGNIKKFQKEYSKENPTEYRNSLNEWIAFCKEFLKTYKAATIFDITTLKKAEEYADIVEFYKDVDNLCYKLEFCPIKTSFIENLIDNGDLYLFRINNKDFSSKSTGTKNLHTLYLQAIFDERNLNNPTIMLNGGAELFYRKESIEQKNRITHKAGSILVNKVCKDGTSLDDKIRNEIYQYENKFIDTLSDEAKKVLPNVIKKEATHDITKDKRFTSDKFFFHCPLTINYKEGDTKQFNNEVLSFLRGNPDINIIGIDRGERNLIYVTVINQKGEILDSVSFNTVTNKSSKIEQTVDYEEKLAVREKERIEAKRSWDSISKIATLKEGYLSAIVHEICLLMIKHNAIVVLENLNAGFKRIRGGLSEKSVYQKFEKMLINKLNYFVSKKESDWNKPSGLLNGLQLSDQFESFEKLGIQSGFIFYVPAAYTSKIDPTTGFANVLNLSKVRNVDAIKSFFSNFNEISYSKKEALFKFSFDLDSLSKKGFSSFVKFSKSKWNVYTFGERIIKPKNKQGYREDKRINLTFEMKKLLNEYKVSFDLENNLIPNLTSANLKDTFWKELFFIFKTTLQLRNSVTNGKEDVLISPVKNAKGEFFVSGTHNKTLPQDCDANGAYHIALKGLMILERNNLVREEKDTKKIMAISNVDWFEYVQKRRGVL

SEQ ID NO: 3 - protein, 1307 aa, Acidaminococcus sp.
MTQFEGFTNLYQVSKTLRFELIPQGKTLKHIQEQGFIEEDKARNDHYKELKPIIDRIYKTYADQCLQLVQLDWENLSAAIDSYRKEKTEETRNALIEEQATYRNAIHDYFIGRTDNLTDAINKRHAEIYKGLFKAELFNGKVLKQLGTVTTTEHENALLRSFDKFTTYFSGFYENRKNVFSAEDISTAIPHRIVQDNFPKFKENCHIFTRLITAVPSLREHFENVKKAIGIFVSTSIEEVFSFPFYNQLLTQTQIDLYNQLLGGISREAGTEKIKGLNEVLNLAIQKNDETAHIIASLPHRFIPLFKQILSDRNTLSFILEEFKSDEEVIQSFCKYKTLLRNENVLETAEALFNELNSIDLTHIFISHKKLETISSALCDHWDTLRNALYERRISELTGKITKSAKEKVQRSLKHEDINLQEIISAAGKELSEAFKQKTSEILSHAHAALDQPLPTTLKKQEEKEILKSQLDSLLGLYHLLDWFAVDESNEVDPEFSARLTGIKLEMEPSLSFYNKARNYATKKPYSVEKFKLNFQMPTLASGWDVNKEKNNGAILFVKNGLYYLGIMPKQKGRYKALSFEPTEKTSEGFDKMYYDYFPDAAKMIPKCSTQLKAVTAHFQTHTTPILLSNNFIEPLEITKEIYDLNNPEKEPKKFQTAYAKKTGDQKGYREALCKWIDFTRDFLSKYTKTTSIDLSSLRPSSQYKDLGEYYAELNPLLYHISFQRIAEKEIMDAVETGKLYLFQIYNKDFAKGHHGKPNLHTLYWTGLFSPENLAKTSIKLNGQAELFYRPKSRMKRMAHRLGEKMLNKKLKDQKTPIPDTLYQELYDYVNHRLSHDLSDEARALLPNVITKEVSHEIIKDRRFTSDKFFFHVPITLNYQAANSPSKFNQRVNAYLKEHPETPIIGIDRGERNLIYITVIDSTGKILEQRSLNTIQQFDYQKKLDNREKERVAARQAWSVVGTIKDLKQGYLSQVIHEIVDLMIHYQAVVVLENLNFGFKSKRTGIAEKAVYQQFEKMLIDKLNCLVLKDYPAEKVGGVLNPYQLTDQFTSFAKMGTQSGFLFYVPAPYTSKIDPLTGFVDPFVWKTIKNHESRKHFLEGFDFLHYDVKTGDFILHFKMNRNLSFQRGLPGFMPAWDIVFEKNETQFDAKGTPFIAGKRIVPVIENHRFTGRYRDLYPANELIALLEEKGIVFRDGSNILPKLLENDDSHAIDTMVALIRSVLQMRNSNAATGEDYINSPVRDLNGVCFDSRFQNPEWPMDADANGAYHIALKGQLLLNHLKESKDLKLQNGISNQDWLAYIQELRN

SEQ ID NO: 4 - protein, 1228 aa, Unknown
  Description of Unknown: Lachnospiraceae bacterium sequence
MSKLEKFTNCYSLSKTLRFKAIPVGKTQENIDNKRLLVEDEKRAEDYKGVKKLLDRYYLSFINDVLHSIKLKNLNNYISLFRKKTRTEKENKELENLEINLRKEIAKAFKGNEGYKSLFKKDIIETILPEFLDDKDEIALVNSFNGFTTAFTGFFDNRENMFSEEAKSTSIAFRCINENLTRYISNMDIFEKVDAIFDKHEVQEIKEKILNSDYDVEDFFEGEFFNFVLTQEGIDVYNAIIGGFVTESGEKIKGLNEYINLYNQKTKQKLPKFKPLYKQVLSDRESLSFYGEGYTSDEEVLEVFRNTLNKNSEIFSSIKKLEKLFKNFDEYSSAGIFVKNGPAISTISKDIFGEWNVIRDKWNAEYDDIHLKKKAVVTEKYEDDRRKSFKKIGSFSLEQLQEYADADLSVVEKLKEIIIQKVDEIYKVYGSSEKLFDADFVLEKSLKKNDAVVAIMKDLLDSVKSFENYIKAFFGEGKETNRDESFYGDFVLAYDILLKVDHIYDAIRNYVTQKPYSKDKFKLYFQNPQFMGGWDKDKETDYRATILRYGSKYYLAIMDKKYAKCLQKIDKDDVNGNYEKINYKLLPGPNKMLPKVFFSKKWMAYYNPSEDIQKIYKNGTFKKGDMFNLNDCHKLIDFFKDSISRYPKWSNAYDFNFSETEKYKDIAGFYREVEEQGYKVSFESASKKEVDKLVEEGKLYMFQIYNKDFSDKSHGTPNLHTMYFKLLFDENNHGQIRLSGGAELFMRRASLKKEELVVHPANSPIANKNPDNPKKTTTLSYDVYKDKRFSEDQYELHIPIAINKCPKNIFKINTEVRVLLKHDDNPYVIGIDRGERNLLYIVVVDGKGNIVEQYSLNEIINNFNGIRIKTDYHSLLDKKEKERFEARQNWTSIENIKELKAGYISQVVHKICELVEKYDAVIALEDLNSGFKNSRVKVEKQVYQKFEKMLIDKLNYMVDKKSNPCATGGALKGYQITNKFESFKSMSTQNGFIFYIPAWLTSKIDPSTGFVNLLKTKYTSIADSKKFISSFDRIMYVPEEDLFEFALDYKNFSRTDADYIKKWKLYSYGNRIRIFRNPKKNNVFDWEEVCLTSAYKELFNKYGINYQQGDIRALLCEQSDKAFYSSFMALMSLMLQMRNSITGRTDVDFLISPVKNSDGIFYDSRNYEAQENAILPKNADANGAYNIARKVLWAIGQFKKAEDEKLDKVKIAISNKEWLEYAQTSVKH

SEQ ID NO: 5 - protein, 1300 aa, Francisella novicida
MSIYQEFVNKYSLSKTLRFELIPQGKTLENIKARGLILDDEKRAKDYKKAKQIIDKYHQFFIEEILSSVCISEDLLQNYSDVYFKLKKSDDDNLQKDFKSAKDTIKKQISEYIKDSEKFKNLFNQNLIDAKKGQESDLILWLKQSKDNGIELFKANSDITDIDEALEIIKSFKGWTTYFKGFHENRKNVYSSNDIPTSIIYRIVDDNLPKFLENKAKYESLKDKAPEAINYEQIKKDLAEELTFDIDYKTSEVNQRVFSLDEVFEIANFNNYLNQSGITKFNTIIGGKFVNGENTKRKGINEYINLYSQQINDKTLKKYKMSVLFKQILSDTESKSFVIDKLEDDSDVVTTMQSFYEQIAAFKTVEEKSIKETLSLLFDDLKAQKLDLSKIYFKNDKSLTDLSQQVFDDYSVIGTAVLEYITQQIAPKNLDNPSKKEQELIAKKTEKAKYLSLETIKLALEEFNKHRDIDKQCRFEEILANFAAIPMIFDEIAQNKDNLAQISIKYQNQGKKDLLQASAEDDVKAIKDLLDQTNNLLHKLKIFHISQSEDKANILDKDEHFYLVFEECYFELANIVPLYNKIRNYITQKPYSDEKFKLNFENSTLANGWDKNKEPDNTAILFIKDDKYYLGVMNKKNNKIFDDKAIKENKGEGYKKIVYKLLPGANKMLPKVFFSAKSIKFYNPSEDILRIRNHSTHTKNGSPQKGYEKFEFNIEDCRKFIDFYKQSISKHPEWKDFGFRFSDTQRYNSIDEFYREVENQGYKLTFENISESYIDSVVNQGKLYLFQIYNKDFSAYSKGRPNLHTLYWKALFDERNLQDVVYKLNGEAELFYRKQSIPKKITHPAKEAIANKNKDNPKKESVFEYDLIKDKRFTEDKFFFHCPITINFKSSGANKFNDEINLLLKEKANDVHILSIDRGERHLAYYTLVDGKGNIIKQDTFNIIGNDRMKTNYHDKLAAIEKDRDSARKDWKKINNIKEMKEGYLSQVVHEIAKLVIEYNAIVVFEDLNFGFKRGRFKVEKQVYQKLEKMLIEKLNYLVFKDNEFDKTGGVLRAYQLTAPFETFKKMGKQTGIIYYVPAGFTSKICPVTGFVNQLYPKYESVSKSQEFFSKFDKICYNLDKGYFEFSFDYKNFGDKAAKGKWTIASFGSRLINFRNSDKNHNWDTREVYPTKELEKLLKDYSIEYGHGECIKAAICGESDKKFFAKLTSVLNTILQMRNSKTGTELDYLISPVADVNGNFFDSRQAPKNMPQDADANGAYHIGLKGLMLLGRIKNNQEGKKLNLVIKNEEYFEFVQNRNN

SEQ ID NO: 6 - protein, 1257 aa, Prevotella bryantii
MQINNLKIIYMKFTDFTGLYSLSKTLRFELKPIGKTLENIKKAGLLEQDQHRADSYKKVKKIIDEYHKAFIEKSLSNFELKYQSEDKLDSLEEYLMYYSMKRIEKTEKDKFAKIQDNLRKQIADHLKGDESYKTIFSKDLIRKNLPDFVKSDEERTLIKEFKDFTTYFKGFYENRENMYSAEDKSTAISHRIIHENLPKFVDNINAFSKIILIPELREKLNQIYQDFEEYLNVESIDEIFHLDYFSMVMTQKQIEVYNAIIGGKSTNDKKIQGLNEYINLYNQKHKDCKLPKLKLLFKQILSDRIAISWLPDNFKDDQEALDSIDTCYKNLLNDGNVLGEGNLKLLLENIDTYNLKGIFIRNDLQLTDISQKMYASWNVIQDAVILDLKKQVSRKKKESAEDYNDRLKKLYTSQESFSIQYLNDCLRAYGKTENIQDYFAKLGAVNNEHEQTINLFAQVRNAYTSVQAILTTPYPENANLAQDKETVALIKNLLDSLKRLQRFIKPLLGKGDESDKDERFYGDFTPLWETLNQITPLYNMVRNYMTRKPYSQEKIKLNFENSTLLGGWDLNKEHDNTAIILRKNGLYYLAIMKKSANKIFDKDKLDNSGDCYEKMVYKLLPGANKMLPKVFFSKSRIDEFKPSENIIENYKKGTHKKGANFNLADCHNLIDFFKSSISKHEDWSKFNFHFSDTSSYEDLSDFYREVEQQGYSISFCDVSVEYINKMVEKGDLYLFQIYNKDFSEFSKGTPNMHTLYWNSLFSKENLNNIIYKLNGQAEIFFRKKSLNYKRPTHPAHQAIKNKNKCNEKKESIFDYDLVKDKRYTVDKFQFHVPITMNFKSTGNTNINQQVIDYLRTEDDTHIIGIDRGERHLLYLVVIDSHGKIVEQFTLNEIVNEYGGNIYRTNYHDLLDTREQNREKARESWQTIENIKELKEGYISQVIHKITDLMQKYHAVVVLEDLNMGFMRGRQKVEKQVYQKFEEMLINKLNYLVNKKADQNSAGGLLHAYQLTSKFESFQKLGKQSGFLFYIPAWNTSKIDPVTGFVNLFDTRYESIDKAKAFFGKFDSIRYNADKDWFEFAFDYNNFTTKAEGTRTNWTICTYGSRIRTFRNQAKNSQWDNEEIDLTKAYKAFFAKHGINIYDNIKEAIAMETEKSFFEDLLHLLKLTLQMRNSITGTTTDYLISPVHDSKGNFYDSRICDNSLPANADANGAYNIARKGLMLIQQIKDSTSSNRFKFSPITNKDWLIFAQEKPYLND

SEQ ID NO: 7 - protein, 1154 aa, Proteocatella sphenisci
MENFKNLYPINKTLRFELRPYGKTLENFKKSGLLEKDAFKANSRRSMQAIIDEKFKETIEERLKYTEFSECDLGNMTSKDKKITDKAATNLKKQVILSFDDEIFNNYLKPDKNIDALFKNDPSNPVISTFKGFTTYFVNFFEIRKHIFKGESSGSMAYRIIDENLTTYLNNIEKIKKLPEELKSQLEGIDQIDKLNNYNEFITQSGITHYNEIIGGISKSENVKIQGINEGINLYCQKNKVKLPRLTPLYKMILSDRVSNSFVLDTIENDTELIEMISDLINKTEISQDVIMSDIQNIFIKYKQLGNLPGISYSSIVNAICSDYDNNFGDGKRKKSYENDRKKHLETNVYSINYISELLTDTDVSSNIKMRYKELEQNYQVCKENFNATNWMNIKNIKQSEKTNLIKDLLDILKSIQRFYDLFDIVDEDKNPSAEFYTWLSKNAEKLDFEFNSVYNKSRNYLTRKQYSDKKIKLNFDSPTLAKGWDANKEIDNSTIIMRKFNNDRGDYDYFLGIWNKSTPANEKIIPLEDNGLFEKMQYKLYPDPSKMLPKQFLSKIWKAKHPTTPEFDKKYKEGRHKKGPDFEKEFLHELIDCFKHGLVNHDEKYQDVFGFNLRNTEDYNSYTEFLEDVERCNYNLSFNKIADTSNLINDGKLYVFQIWSKDFSIDSKGTKNLNTIYFESLFSEENMIEKMFKLSGEAEIFYRPASLNYCEDIIKKGHHHAELKDKFDYPIIKDKRYSQDKFFFHVPMVINYKSEKLNSKSLNNRTNENLGQFTHIIGIDRGERHLIYLTVVDVSTGEIVEQKHLDEIINTDTKGVEHKTHYLNKLEEKSKTRDNERKSWEAIETIKELKEGYISHVINEIQKLQEKYNALIVMENLNYGFKNSRIKVEKQVYQKFETALIKKFNYIIDKKDPETYIHGYQLTNPITTLDKIGNQSGIVLYIPAWNTSKIDPVTGFVNLLYADDLKYKNQEQAKSFIQKIDNIYFENGEFKFDIDFSKWNNRYSISKTKWTLTSYGTRIQTFRNPQKNNKWDSAEYDLTEEFKLILNIDGTLKSQDVETYKKFMSLFKLMLQLRNSVTGTDIDYMISPVTDKTGTHFDSRENIKNLPADADANGAYNIARKGIMAIENIMNGISDPLKISNEDYLKYIQNQQE

SEQ ID NO: 8 - protein, 1235 aa, Anaerovibrio sp.
MVAFIDEFVGQYPVSKTLRFEARPVPETKKWLESDQCSVLFNDQKRNEYYGVLKELLDDYYRAYIEDALTSFTLDKALLENAYDLYCNRDTNAFSSCCEKLRKDLVKAFGNLKDYLLGSDQLKDLVKLKAKVDAPAGKGKKKIEVDSRLINWLNNNAKYSAEDREKYIKAIESFEGFVTYLTNYKQARENMFSSEDKSTAIAFRVIDQNMVTYFGNIRIYEKIKAKYPELYSALKGFEKFFSPTAYSEILSQSKIDEYNYQCIGRPIDDADFKGVNSLINEYRQKNGIKARELPVMSMLYKQILSDRDNSFMSEVINRNEEAIECAKNGYKVSYALFNELLQLYKKIFTEDNYGNIYVKTQPLTELSQALFGDWSILRNALDNGKYDKDIINLAELEKYFSEYCKVLDADDAAKIQDKFNLKDYFIQKNALDATLPDLDKITQYKPHLDAMLQAIRKYKLFSMYNGRKKMDVPENGIDFSNEFNAIYDKLSEFSILYDRIRNFATKKPYSDEKMKLSFNMPTMLAGWDYNNETANGCFLFIKDGKYFLGVADSKSKNIFDFKKNPHLLDKYSSKDIYYKVKYKQVSGSAKMLPKVVFAGSNEKIFGHLISKRILEIREKKLYTAAAGDRKAVAEWIDFMKSAIAIHPEWNEYFKFKFKNTAEYDNANKFYEDIDKQTYSLEKVEIPTEYIDEMVSQHKLYLFQLYTKDFSDKKKKKGTDNLHTMYWHGVFSDENLKAVTEGTQPIIKLNGEAEMFMRNPSIEFQVTHEHNKPIANKNPLNTKKESVFNYDLIKDKRYTERKFYFHCPITLNFRADKPIKYNEKINRFVENNPDVCIIGIDRGERHLLYYTVINQTGDILEQGSLNKISGSYTNDKGEKVNKETDYHDLLDRKEKGKHVAQQAWETIENIKELKAGYLSQVVYKLTQLMLQYNAVIVLENLNVGFKRGRTKVEKQVYQKFEKAMIDKLNYLVFKDRGYEMNGSYAKGLQLTDKFESFDKIGKQTGCIYYVIPSYTSHIDPKTGFVNLLNAKLRYENITKAQDTIRKFDSISYNAKADYFEFAFDYRSFGVDMARNEWVVCTCGDLRWEYSAKTRETKAYSVTDRLKELFKAHGIDYVGGENLVSHITEVADKHFLSTLLFYLRLVLKMRYTVSGTENENDFILSPVEYAPGKFFDSREATSTEPMNADANGAYHIALKGLMTIRGIEDGKLHNYGKGGENAAWFKFMQNQEYKNNG

SEQ ID NO: 9 - protein, 1264 aa, Moraxella caprae
MLFQDFTHLYPLSKTMRFELKPIGKTLEHIHAKNFLSQDETMADMYQKVKAILDDYHRDFIADMMGEVKLTKLAEFYDVYLKFRKNPKDDGLQKQLKDLQAVLRKEIVKPIGNGGKYKAGYDRLFGAKLFKDGKELGDLAKFVIAQEGESSPKLAHLAHFEKFSTYFTGFHDNRKNMYSDEDKHTAITYRLIHENLPRFIDNLQILATIKQKHSALYDQIINELTASGLDVSLASHLDGYHKLLTQEGITAYNTLLGGISGEAGSRKIQGINELINSHHNQHCHKSERIAKLRPLHKQILSDGMGVSFLPSKFADDSEMCQAVNEFYRHYADVFAKVQSLFDGFDDHQKDGIYVEHKNLNELSKQAFGDFALLGRVLDGYYVDVVNPEFNERFAKAKTDNAKAKLTKEKDKFIKGVHSLASLEQAIEHYTARHDDESVQAGKLGQYFKHGLAGVDNPIQKIHNNHSTIKGFLERERPAGERALPKIKSGKNPEMTQLRQLKELLDNALNVAHFAKLLTTKTTLDNQDGNFYGEFGALYDELAKIPTLYNKVRDYLSQKPFSTEKYKLNFGNPTLLNGWDLNKEKDNFGIILQKDGCYYLALLDKAHKKVFDNAPNTGKNVYQKMIYKLLPGPNKMLPKVFFAKSNLDYYNPSAELLDKYAQGTHKKGNNFNLKDCHALIDFFKAGINKHPEWQHFGFKFSPTSSYQDLSDFYREVEPQGYQVKFVDINADYINELVEQGQLYLFQIYNKDFSPKAHGKPNLHTLYFKALFSKDNLANPIYKLNGEAQIFYRKASLDMNETTIHRAGEVLENKNPDNPKKRQFVYDIIKDKRYTQDKFMLHVPITMNFGVQGMTIKEFNKKVNQSIQQYDEVNVIGIDRGERHLLYLTVINSKGEILEQRSLNDITTASANGTQMTTPYHKILDKREIERLNARVGWGEIETIKELKSGYLSHVVHQISQLMLKYNAIVVLEDLNFGFKRGRFKVEKQIYQNFENALIKKLNHLVLKDEADDEIGSYKNALQLTNNFTDLKSIGKQTGFLFYVPAWNTSKIDPETGFVDLLKPRYENIAQSQAFFGKFDKICYNADKDYFEFHIDYAKFTDKAKNSRQIWKICSHGDKRYVYDKTANQNKGATKGINVNDELKSLFARHHINDKQPNLVMDICQNNDKEFHKSLIYLLKTLLALRYSNASSDEDFILSPVANDEGMFFNSALADDTQPQNADANGAYHIALKGLWVLEQIKNSDDLNKVKLAIDNQTWLNFAQNR

SEQ ID NO: 10 - protein, 1230 aa, Unknown
  Description of Unknown: Lachnospiraceae bacterium sequence
MHENNGKIADNFIGIYPVSKTLRFELKPVGKTQEYIEKHGILDEDLKRAGDYKSVKKIIDAYHKYFIDEALNGIQLDGLKNYYELYEKKRDNNEEKEFQKIQMSLRKQIVKRFSEHPQYKYLFKKELIKNVLPEFTKDNAEEQTLVKSFQEFTTYFEGFHQNRKNMYSDEEKSTAIAYRVVHQNLPKYIDNMRIFSMILNTDIRSDLTELFNNLKTKMDITIVEEYFAIDGFNKVVNQKGIDVYNTILGAFSTDDNTKIKGLNEYINLYNQKNKAKLPKLKPLFKQILSDRDKISFIPEQFDSDTEVLEAVDMFYNRLLQFVIENEGQITISKLLTNFSAYDLNKIYVKNDTTISAISNDLFDDWSYISKAVRENYDSENVDKNKRAAAYEEKKEKALSKIKMYSIEELNFFVKKYSCNECHIEGYFERRILEILDKMRYAYESCKILHDKGLINNISLCQDRQAISELKDFLDSIKEVQWLLKPLMIGQEQADKEEAFYTELLRIWEELEPITLLYNKVRNYVTKKPYTLEKVKLNFYKSTLLDGWDKNKEKDNLGIILLKDGQYYLGIMNRRNNKIADDAPLAKTDNVYRKMEYKLLTKVSANLPRIFLKDKYNPSEEMLEKYEKGTHLKGENFCIDDCRELIDFFKKGIKQYEDWGQFDFKFSDTESYDDISAFYKEVEHQGYKITFRDIDETYIDSLVNEGKLYLFQIYNKDFSPYSKGTKNLHTLYWEMLFSQQNLQNIVYKLNGNAEIFYRKASINQKDVVVHKADLPIKNKDPQNSKKESMFDYDIIKDKRFTCDKYQFHVPITMNFKALGENHFNRKVNRLIHDAENMHIIGIDRGERNLIYLCMIDMKGNIVKQISLNEIISYDKNKLEHKRNYHQLLKTREDENKSARQSWQTIHTIKELKEGYLSQVIHVITDLMVEYNAIVVLEDLNFGFKQGRQKFERQVYQKFEKMLIDKLNYLVDKSKGMDEDGGLLHAYQLTDEFKSFKQLGKQSGFLYYIPAWNTSKLDPTTGFVNLFYTKYESVEKSKEFINNFTSILYNQEREYFEFLFDYSAFTSKAEGSRLKWTVCSKGERVETYRNPKKNNEWDTQKIDLTFELKKLFNDYSISLLDGDLREQMGKIDKADFYKKFMKLFALIVQMRNSDEREDKLISPVLNKYGAFFETGKNERMPLDADANGAYNIARKGLWIIEKIKNTDVEQLDKVKLTISNKEWLQYAQEHIL

SEQ ID NO: 11 - protein, 1261 aa, Eubacterium coprostanoligenes
MDFFKNDMYFLCINGIIVISKLFAYLFLMYKRGVVMIKDNFVNVYSLSKTIRMALIPWGKTEDNFYKKFLLEEDEERAKNYIKVKGYMDEYHKNFIESALNSVVLNGVDEYCELYFKQNKSDSEVKKIESLEASMRKQISKAMKEYTVDGVKIYPLLSKKEFIRELLPEFLTQDEEIETLEQFNDFSTYFQGFWENRKNIYTDEEKSTGVPYRCINDNLPKFLDNVKSFEKVILALPQKAVDELNANFNGVYNVDVQDVFSVDYFNFVLSQSGIEKYNNIIGGYSNSDASKVQGLNEKINLYNQQIAKSDKSKKLPLLKPLYKQILSDRSSLSFIPEKFKDDNEVLNSINVLYDNIAESLEKANDLMSDIANYNTDNIFISSGVAVTDISKKVFGDWSLIRNNWNDEYESTHKKGKNEEKFYEKEDKEFKKIKSFSVSELQRLANSDLSIVDYLVDESASLYADIKTAYNNAKDLLSNEYSHSKRLSKNDDAIELIKSFLDSIKNYEAFLKPLCGTGKEESKDNAFYGAFLECFEEIRQVDAVYNKVRNHITQKPYSNDKIKLNFQNPQFLAGWDKNKERAYRSVLLRNGEKYYLAIMEKGKSKLFEDFPEDESSPFEKIDYKLLPEPSKMLPKVFFATSNKDLFNPSDEILNIRATGSFKKGDSFNLDDCHKFIDFYKASIENHPDWSKFDFDFSETNDYEDISKFFKEVSDQGYSIGYRKISESYLEEMVDNGSLYMFQLYNKDFSENRKSKGTPNLHTLYFKMLFDERNLEDVVYKLSGGAEMFYRKPSIDKNEMIVHPKNQPIDNKNPNNVKKTSTFEYDIVKDMRYTKPQFQLHLPIVLNFKANSKGYINDDVRNVLKNSEDTYVIGIDRGERNLVYACVVDGNGKLVEQVPLNVIEADNGYKTDYHKLLNDREEKRNEARKSWKTIGNIKELKEGYISQVVHKICQLVVKYDAVIAMEDLNSGFVNSRKKVEKQVYQKFERMLTQKLNYLVDKKLDPNEMGGLLNAYQLTNEATKVRNGRQDGIIFYIPAWLTSKIDPTTGFVNLLKPKYNSVSASKEFFSKFDEIRYNEKENYFEFSFNYDNFPKCNADFKREWTVCTYGDRIRTFRDPENNNKFNSEVVVLNDEFKNLFVEFDIDYTDNLKEQILAMDEKSFYKKLMGLLSLTLQMRNSISKNVDVDYLISPVKNSNGEFYDSRNYDITSSLPCDADSNGAYNIARKGLWAINQIKQADDETKANISIKNSEWLQYAQNCDEV

SEQ ID NO: 12 - protein, 1064 aa, Smithella sp.
MEKYKITKTIRFKLLPDKIQDISRQVAVLQNSTNAEKKNNLLRLVQRGQELPKLLNEYIRYSDNHKLKSNVTVHFRWLRLFTKDLFYNWKKDNTEKKIKISDVVYLSHVFEAFLKEWESTIERVNADCNKPEESKTRDAEIALSIRKLGIKHQLPFIKGFVDNSNDKNSEDTKSKLTALLSEFEAVLKICEQNYLPSQSSGIAIAKASFNYYTINKKQKDFEAEIVALKKQLHARYGNKKYDQLLRELNLIPLKELPLKELPLIEFYSEIKKRKSTKKSEFLEAVSNGLVFDDLKSKFPLFQTESNKYDEYLKLSNKITQKSTAKSLLSKDSPEAQKLQTEITKLKKNRGEYFKKAFGKYVQLCELYKEIAGKRGKLKGQIKGIENERIDSQRLQYWALVLEDNLKHSLILIPKEKTNELYRKVWGAKDDGASSSSSSTLYYFESMTYRALRKLCFGINGNTFLPEIQKELPQYNQKEFGEFCFHKSNDDKEIDEPKLISFYQSVLKTDFVKNTLALPQSVFNEVAIQSFETRQDFQIALEKCCYAKKQIISESLKKEILENYNTQIFKITSLDLQRSEQKNLKGHTRIWNRFWTKQNEEINYNLRLNPEIAIVWRKAKKTRIEKYGERSVLYEPEKRNRYLHEQYTLCTTVTDNALNNEITFAFEDTKKKGTEIVKYNEKINQTLKKEFNKNQLWFYGIDAGEIELATLALMNKDKEPQLFTVYELKKLDFFKHGYIYNKERELVIREKPYKAIQNLSYFLNEELYEKTFRDGKFNETYNELFKEKHVSAIDLTTAKVINGKIILNGDMITFLNLRILHAQRKIYEELIENPHAELKEKDYKLYFEIEGKDKDIYISRLDFEYIKPYQEISNYLFAYFASQQINEAREEEQINQTKRALAGNMIGVIYYLYQKYRGIISIEDLKQTKVESDRNKFEGNIERPLEWALYRKFQQEGYVPPISELIKLRELEKFPLKDVKQPKYENIQQFGIIKFVSPEETSTTCPKCLRRFKDYDKNKQEGFCKCQCGFDTRNDLKGFEGLNDPDKVAAFNIAKRGFEDLQKYK

SEQ ID NO: 13 - protein, 1232 aa, Sulfuricurvum sp.
MLHAFTNQYQLSKTLRFGATLKEDEKKCKSHEELKGFVDISYENMKSSATIAESLNENELVKKCERCYSEIVKFHNAWEKIYYRTDQIAVYKDFYRQLSRKARFDAGKQNSQLITLASLCGMYQGAKLSRYITNYWKDNITRQKSFLKDFSQQLHQYTRALEKSDKAHTKPNLINFNKTFMVLANLVNEIVIPLSNGAISFPNISKLEDGEESHLIEFALNDYSQLSELIGELKDAIATNGGYTPFAKVTLNHYTAEQKPHVFKNDIDAKIRELKLIGLVETLKGKSSEQIEEYFSNLDKFSTYNDRNQSVIVRTQCFKYKPIPFLVKHQLAKYISEPNGWDEDAVAKVLDAVGAIRSPAHDYANNQEGFDLNHYPIKVAFDYAWEQLANSLYTTVTFPQEMCEKYLNSIYGCEVSKEPVFKFYADLLYIRKNLAVLEHKNNLPSNQEEFICKINNTFENIVLPYKISQFETYKKDILAWINDGHDHKKYTDAKQQLGFIRGGLKGRIKAEEVSQKDKYGKIKSYYENPYTKLTNEFKQISSTYGKTFAELRDKFKEKNEITKITHFGIIIEDKNRDRYLLASELKHEQINHVSTILNKLDKSSEFITYQVKSLTSKTLIKLIKNHTTKKGAISPYADFHTSKTGFNKNEIEKNWDNYKREQVLVEYVKDCLTDSTMAKNQNWAEFGWNFEKCNSYEDIEHEIDQKSYLLQSDTISKQSIASLVEGGCLLLPIINQDITSKERKDKNQFSKDWNHIFEGSKEFRLHPEFAVSYRTPIEGYPVQKRYGRLQFVCAFNAHIVPQNGEFINLKKQIENFNDEDVQKRNVTEFNKKVNHALSDKEYVVIGIDRGLKQLATLCVLDKRGKILGDFEIYKKEFVRAEKRSESHWEHTQAETRHILDLSNLRVETTIEGKKVLVDQSLTLVKKNRDTPDEEATEENKQKIKLKQLSYIRKLQHKMQTNEQDVLDLINNEPSDEEFKKRIEGLISSFGEGQKYADLPINTMREMISDLQGVIARGNNQTEKNKIIELDAADNLKQGIVANMIGIVNYIFAKYSYKAYISLEDLSRAYGGAKSGYDGRYLPSTSQDEDVDFKEQQNQMLAGLGTYQFFEMQLLKKLQKIQSDNTVLRFVPAFRSADNYRNILRLEETKYKSKPFGVVHFIDPKFTSKKCPVCSKTNVYRDKDDILVCKECGFRSDSQLKERENNIHYIHNGDDNGAYHIALKSVENLIQMK

SEQ ID NO: 14 - protein, 1057 aa, Unknown
  Description of Unknown: Microgenomates bacterium sequence
MEIQELKNLYEVKKTVRFELKPSKKKIFEGGDVIKLQKDFEKVQKFFLDIFVYKNEHTKLEFKKKREIKYTWLRTNTKNEFYNWRGKSDTGKNYALNKIGFLAEEILRWLNEWQELTKSLKDLTQREEHKQERKSDIAFVLRNFLKRQNLPFIKDFFNAVIDIQGKQGKESDDKIRKFREEIKEIEKNLNACSREYLPTQSNGVLLYKASFSYYTLNKTPKEYEDLKKEKESELSSVLLKEIYRRKRFNRTTNQKDTLFECTSDWLVKIKLGKDIYEWTLDEAYQKMKIWKANQKSNFIEAVAGDKLTHQNFRKQFPLFDASDEDFETFYRLTKALDKNPENAKKIAQKRGKFFNAPNETVQTKNYHELCELYKRIAVKRGKIIAEIKGIENEEVQSQLLTHWAVIAEERDKKFIVLIPRKNGGKLENHKNAHAFLQEKDRKEPNDIKVYHFKSLTLRSLEKLCFKEAKNTFAPEIKKETNPKIWFPTYKQEWNSTPERLIKFYKQVLQSNYAQTYLDLVDFGNLNTFLETHFTTLEEFESDLEKTCYTKVPVYFAKKELETFADEFEAEVFEITTRSISTESKRKENAHAEIWRDFWSRENEEENHITRLNPEVSVLYRDEIKEKSNTSRKNRKSNANNRFSDPRFTLATTITLNADKKKSNLAFKTVEDINIHIDNFNKKFSKNFSGEWVYGIDRGLKELATLNVVKFSDVKNVFGVSQPKEFAKIPIYKLRDEKAILKDENGLSLKNAKGEARKVIDNISDVLEEGKEPDSTLFEKREVSSIDLTRAKLIKGHIISNGDQKTYLKLKETSAKRRIFELFSTAKIDKSSQFHVRKTIELSGTKIYWLCEWQRQDSWRTEKVSLRNTLKGYLQNLDLKNRFENIETIEKINHLRDAITANMVGILSHLQNKLEMQGVIALENLDTVREQSNKKMIDEHFEQSNEHVSRRLEWALYCKFANTGEVPPQIKESIFLRDEFKVCQIGILNFIDVKGTSSNCPNCDQESRKTGSHFICNFQNNCIFSSKENRNLLEQNLHNSDDVAAFNIAKRGLEIVKV

SEQ ID NO: 15 - protein, 1342 aa, Artificial Sequence
  Description of Artificial Sequence: Synthetic polypeptide
MGHHHHHHSSGVDLGTENLYFQSPAAKKKKLDGSVDMNNGTNNFQNFIGISSLQKTLRNALIPTETTQQFIVKNGIIKEDELRGENRQILKDIMDDYYRGFISETLSSIDDIDWTSLFEKMEIQLKNGDNKDTLIKEQTEYRKAIHKKFANDDRFKNMFSAKLISDILPEFVIHNNNYSASEKEEKTQVIKLFSRFATSFKDYFKNRANCFSADDISSSSCHRIVNDNAEIFFSNALVYRRIVKSLSNDDINKISGDMKDSLKEMSLEEIYSYEKYGEFITQEGISFYNDICGKVNSFMNLYCQKNKENKNLYKLQKLHKQILCIADTSYEVPYKFESDEEVYQSVNGFLDNISSKHIVERLRKIGDNYNGYNLDKIYIVSKFYESVSQKTYRDWETINTALEIHYNNILPGNGKSKADKVKKAVKNDLQKSITEINELVSNYKLCSDDNIKAETYIHEISHILNNFEAQELKYNPEIHLVESELKASELKNVLDVIMNAFHWCSVFMTEELVDKDNNFYAELEEIYDEIYPVISLYNLVRNYVTQKPYSTKKIKLNFGIPTLADGWSKSKEYSNNAIILMRDNLYYLGIFNAKNKPDKKIIEGNTSENKGDYKKMIYNLLPGPNKMIPKVFLSSKTGVETYKPSAYILEGYKQNKHIKSSKDFDITFCHDLIDYFKNCIAIHPEWKNFGFDFSDTSTYEDISGFYREVELQGYKIDWTYISEKDIDLLQEKGQLYLFQIYNKDFSKKSTGNDNLHTMYLKNLFSEENLKDIVLKLNGEAEIFFRKSSIKNPIIHKKGSILVNRTYEAEEKDQFGNIQIVRKNIPENIYQELYKYFNDKSDKELSDEAAKLKNVVGHHEAATNIVKDYRYTYDKYFLHMPITINFKANKTGFINDRILQYIAKEKDLHVIGIDRGERNLIYVSVIDTCGNIVEQKSFNIVNGYDYQIKLKQQEGARQIARKEWKEIGKIKEIKEGYLSLVIHEISKMVIKYNAIIAMEDLSYGFKKGRFKVERQVYQKFETMLINKLNYLVFKDISITENGGLLKGYQLTYIPDKLKNVGHQCGCIFYVPAAYTSKIDPTTGFVNIFKFKDLTVDAKREFIKKFDSIRYDSEKNLFCFTFDYNNFITQNTVMSKSSWSVYTYGVRIKRRFVNGRFSNESDTIDITKDMEKTLEMTDINWRDGHDLRQDIIDYEIVQHIFEIFRLTVQMRNSLSELEDRDYDRLISPVLNENNIFYDSAKAGDALPKDADANGAYCIALKGLYEIKQITENWKEDGKFSRDKLKISNKDWFDFIQNKRYLKRPAATKKAGQAKKKKASGSGAGSPKKKRKVEDPKKKRKVIPG

SEQ ID NO: 16 - protein, 1320 aa, Artificial Sequence
  Description of Artificial Sequence: Synthetic polypeptide
SPAAKKKKLDGSVDMNNGTNNFQNFIGISSLQKTLRNALIPTETTQQFIVKNGIIKEDELRGENRQILKDIMDDYYRGFISETLSSIDDIDWTSLFEKMEIQLKNGDNKDTLIKEQTEYRKAIHKKFANDDRFKNMFSAKLISDILPEFVIHNNNYSASEKEEKTQVIKLFSRFATSFKDYFKNRANCFSADDISSSSCHRIVNDNAEIFFSNALVYRRIVKSLSNDDINKISGDMKDSLKEMSLEEIYSYEKYGEFITQEGISFYNDICGKVNSFMNLYCQKNKENKNLYKLQKLHKQILCIADTSYEVPYKFESDEEVYQSVNGFLDNISSKHIVERLRKIGDNYNGYNLDKIYIVSKFYESVSQKTYRDWETINTALEIHYNNILPGNGKSKADKVKKAVKNDLQKSITEINELVSNYKLCSDDNIKAETYIHEISHILNNFEAQELKYNPEIHLVESELKASELKNVLDVIMNAFHWCSVFMTEELVDKDNNFYAELEEIYDEIYPVISLYNLVRNYVTQKPYSTKKIKLNFGIPTLADGWSKSKEYSNNAIILMRDNLYYLGIFNAKNKPDKKIIEGNTSENKGDYKKMIYNLLPGPNKMIPKVFLSSKTGVETYKPSAYILEGYKQNKHIKSSKDFDITFCHDLIDYFKNCIAIHPEWKNFGFDFSDTSTYEDISGFYREVELQGYKIDWTYISEKDIDLLQEKGQLYLFQIYNKDFSKKSTGNDNLHTMYLKNLFSEENLKDIVLKLNGEAEIFFRKSSIKNPIIHKKGSILVNRTYEAEEKDQFGNIQIVRKNIPENIYQELYKYFNDKSDKELSDEAAKLKNVVGHHEAATNIVKDYRYTYDKYFLHMPITINFKANKTGFINDRILQYIAKEKDLHVIGIDRGERNLIYVSVIDTCGNIVEQKSFNIVNGYDYQIKLKQQEGARQIARKEWKEIGKIKEIKEGYLSLVIHEISKMVIKYNAIIAMEDLSYGFKKGRFKVERQVYQKFETMLINKLNYLVFKDISITENGGLLKGYQLTYIPDKLKNVGHQCGCIFYVPAAYTSKIDPTTGFVNIFKFKDLTVDAKREFIKKFDSIRYDSEKNLFCFTFDYNNFITQNTVMSKSSWSVYTYGVRIKRRFVNGRFSNESDTIDITKDMEKTLEMTDINWRDGHDLRQDIIDYEIVQHIFEIFRLTVQMRNSLSELEDRDYDRLISPVLNENNIFYDSAKAGDALPKDADANGAYCIALKGLYEIKQITENWKEDGKFSRDKLKISNKDWFDFIQNKRYLKRPAATKKAGQAKKKKASGSGAGSPKKKRKVEDPKKKRKVIPG

SEQ ID NO: 17 - protein, 1319 aa, Artificial Sequence
  Description of Artificial Sequence: Synthetic polypeptide
PAAKKKKLDGSVDMNNGTNNFQNFIGISSLQKTLRNALIPTETTQQFIVKNGIIKEDELRGENRQILKDIMDDYYRGFISETLSSIDDIDWTSLFEKMEIQLKNGDNKDTLIKEQTEYRKAIHKKFANDDRFKNMFSAKLISDILPEFVIHNNNYSASEKEEKTQVIKLFSRFATSFKDYFKNRANCFSADDISSSSCHRIVNDNAEIFFSNALVYRRIVKSLSNDDINKISGDMKDSLKEMSLEEIYSYEKYGEFITQEGISFYNDICGKVNSFMNLYCQKNKENKNLYKLQKLHKQILCIADTSYEVPYKFESDEEVYQSVNGFLDNISSKHIVERLRKIGDNYNGYNLDKIYIVSKFYESVSQKTYRDWETINTALEIHYNNILPGNGKSKADKVKKAVKNDLQKSITEINELVSNYKLCSDDNIKAETYIHEISHILNNFEAQELKYNPEIHLVESELKASELKNVLDVIMNAFHWCSVFMTEELVDKDNNFYAELEEIYDEIYPVISLYNLVRNYVTQKPYSTKKIKLNFGIPTLADGWSKSKEYSNNAIILMRDNLYYLGIFNAKNKPDKKIIEGNTSENKGDYKKMIYNLLPGPNKMIPKVFLSSKTGVETYKPSAYILEGYKQNKHIKSSKDFDITFCHDLIDYFKNCIAIHPEWKNFGFDFSDTSTYEDISGFYREVELQGYKIDWTYISEKDIDLLQEKGQLYLFQIYNKDFSKKSTGNDNLHTMYLKNLFSEENLKDIVLKLNGEAEIFFRKSSIKNPIIHKKGSILVNRTYEAEEKDQFGNIQIVRKNIPENIYQELYKYFNDKSDKELSDEAAKLKNVVGHHEAATNIVKDYRYTYDKYFLHMPITINFKANKTGFINDRILQYIAKEKDLHVIGIDRGERNLIYVSVIDTCGNIVEQKSFNIVNGYDYQIKLKQQEGARQIARKEWKEIGKIKEIKEGYLSLVIHEISKMVIKYNAIIAMEDLSYGFKKGRFKVERQVYQKFETMLINKLNYLVFKDISITENGGLLKGYQLTYIPDKLKNVGHQCGCIFYVPAAYTSKIDPTTGFVNIFKFKDLTVDAKREFIKKFDSIRYDSEKNLFCFTFDYNNFITQNTVMSKSSWSVYTYGVRIKRRFVNGRFSNESDTIDITKDMEKTLEMTDINWRDGHDLRQDIIDYEIVQHIFEIFRLTVQMRNSLSELEDRDYDRLISPVLNENNIFYDSAKAGDALPKDADANGAYCIALKGLYEIKQITENWKEDGKFSRDKLKISNKDWFDFIQNKRYLKRPAATKKAGQAKKKKASGSGAGSPKKKRKVEDPKKKRKVIPG

SEQ ID NO: 18 - RNA, 20 nt, Artificial Sequence
  Description of Artificial Sequence: Synthetic oligonucleotide
ggaauuucuacucuuguaga

SEQ ID NO: 19 - RNA, 19 nt, Artificial Sequence
  Description of Artificial Sequence: Synthetic oligonucleotide
uaauucccacucuuguggg

SEQ ID NO: 20 - RNA, 15 nt, Artificial Sequence
  Description of Artificial Sequence: Synthetic oligonucleotide
aucuacaagaguaga

SEQ ID NO: 21 - RNA, 15 nt, Artificial Sequence
  Description of Artificial Sequence: Synthetic oligonucleotide
aucuacacuaguaga

SEQ ID NO: 22 - RNA, 20 nt, Artificial Sequence
  Description of Artificial Sequence: Synthetic oligonucleotide
uaauuucuacuaaguguaga

SEQ ID NO: 23 - RNA, 21 nt, Artificial Sequence
  Description of Artificial Sequence: Synthetic oligonucleotide
uaauuuucuacuuguuguaga

SEQ ID NO: 24 - RNA, 18 nt, Artificial Sequence
  Description of Artificial Sequence: Synthetic oligonucleotide
aauuucuacuguuguaga

SEQ ID NO: 25 - RNA, 19 nt, Artificial Sequence
  Description of Artificial Sequence: Synthetic oligonucleotide
gaauuucuacuguuguaga

SEQ ID NO: 26 - RNA, 10 nt, Artificial Sequence
  Description of Artificial Sequence: Synthetic oligonucleotide
uaauuucuac

SEQ ID NO: 27 - RNA, 6 nt, Artificial Sequence
  Description of Artificial Sequence: Synthetic oligonucleotide
aucuac

SEQ ID NO: 28 - RNA, 11 nt, Artificial Sequence
  Description of Artificial Sequence: Synthetic oligonucleotide
ggaauuucuac

SEQ ID NO: 29 - protein, 1312 aa, Artificial Sequence
  Description of Artificial Sequence: Synthetic polypeptide
MGHHHHHHSSGLVPRGSLQMKTLSDFTNLFPLSKTLRFKLIPIGNTLKNIEASGILDEDRHRAESYVKVKAIIDEYHKAFIDRVLSDTCLQTESIGKHNSLEEFFFYYQIGAKSEQQKKTFKKIQDALRKQIADSLTKDKHFSRIDKKELIQEDLIQFVRDGEDAAEKTSLISEFQNFTVYFTGFHENRQNMYSPDEKSTAIAYRLINENLPKFVDNMKVFDRIAASELASCFDELYHNFEEYLQVERLHDIFSLDYFNLLLTQKHIDVYNALIGGKATETGEKIKGLNEYINLYNQRHKQEKLPKFKMLFKQILTDREAISWLPRQFDDNSQLLSAIEQCYNHLSTYTLKDGSLKYLLENLHTYDTEKIFIRNDSLLTEISQRHYGSWSILPEAIKRHLERANPQKRRETYEAYQSRIEKAFKAYPGFSIAFLNGCLTETGKESPSIESYFESLGAVETETSQQENWFARIANAYTDFREMQNRLHATDVPLAQDAEAVARIKKLLDALKGLQLFIKPLLDTGEEAEKDERFYGDFTEFWNELDTITPLYNMVRNYLTRKPYSEEKIKLNFQNPTLLNGWDLNKEVDNTSVILRRNGRYYLAIMHRNHRRVFSQYPGTERGDCYEKMEYKLLPGANKMLPKVFFSKSRIDEFNPSEELLARYQQGTHKKGENFNLHDCHALIDFFKDSIEKHEEWRNFHFKFSDTSSYTDMSGFYREIETQGYKLSFVPVACEYIDELVRDGKIFLFQIYNKDFSTYSKGKPNMHTLYWEMLFDERNLMNVVYKLNGQAEIFFRKASLSARHPEHPAGLPIKKKQAPTEESCFPYDLIKNKRYTVDQFQFHVPITINFKATGTSNINPSVTDYIRTADDLHIIGIDRGERHLLYLVVIDSQGRICEQFSLNEIVTQYQGHQYRTDYHALLQKKEDERQKARQSWQSIENIKELKEGYLSQVVHKVSELMIKYKAIVVLEDLNAGFKRSRQKVEKQVYQKFEKMLIDKLNYLVFKTAEADQPGGLLHAYQLTNKFESFKKMGKQSGFLFYIPAWNTSKIDPTTGFVNLFDTRYENVDKSRAFFGKFDSIRYRADKGTFEWTFDYNNFHKKAEGTRSSWCLSSHGNRVRTFRNPAKNNQWDNEEIDLTQAFRDLFEAWGIEITSNLKEAICNQSEKKFFSELFELFKLMIQLRNSVTGTNIDYMVSPVENHYGTFFDSRTCDSSLPANADANGAYNIARKGLMLARRIQATPENDPISLTLSNKEWLRFAQGLDETTTYEAAAKRPAATKKAGQAKKKKASGSGAGSPKKKRKVEDPKKKRKV

SEQ ID NO: 30 - DNA, 3942 bp, Artificial Sequence
  Description of Artificial Sequence: Synthetic polynucleotide
atgggccaccatcatcatcatcatagcagcggcctggtgccgcgcggcagcctgcagatgaagaccttgtctgattttaccaatctgttccctttatctaagactctccgtttcaagctgattccaatcggcaacacgctcaagaacattgaagctagtggcatccttgacgaggatcgccaccgcgcggagtcctatgtcaaggtcaaggccatcatcgacgaatatcataaagctttcatcgatcgggtcctgtcggatacttgcctccagacggaatctatcggcaaacacaacagtctcgaggaattctttttctactaccaaattggtgcaaaaagtgaacagcagaaaaagacgtttaaaaagattcaagacgccttgcgcaaacaaatcgcagatagcctcaccaaggacaaacatttttcacggattgataaaaaagaattgatccaagaggatttgatccagtttgtgcgcgatggggaggatgccgctgaaaagacgtctctgatttccgaatttcaaaatttcacagtttattttaccgggtttcatgagaatcgccagaacatgtacagtccggacgagaagtccacggccatcgcatatcgcttaattaacgagaatctcccaaaattcgtagacaacatgaaagtttttgaccgtatcgcggcgtccgaattggcatcgtgtttcgacgaattataccacaacttcgaggaatacctccaagtggagcggttacatgatatctttagtttggactatttcaatctgcttctcacgcagaaacatatcgacgtctataatgctctgatcggtgggaaggcaaccgaaaccggggaaaagatcaagggcttaaatgaatacatcaatctctacaatcaacgtcacaagcaggaaaaactgccaaaattcaagatgttattcaagcaaattcttaccgaccgtgaggcaatcagctggttgccacgccaatttgacgataatagtcagttactctcagccattgaacagtgttataaccacctttcgacctacacactcaaggatgggtcactcaaatacctgttagaaaacctgcatacatacgatactgaaaagatcttcatccgcaatgacagtttacttacggaaatctcccaacggcattacggttcgtggtcgattttaccagaagctatcaaacgtcatctcgagcgcgcgaacccgcaaaaacggcgcgaaacatacgaggcctatcaatctcgcattgagaaggcctttaaggcatatccggggttttcaattgctttcctcaatgggtgtttaacagagacaggtaaggagtcgccatccatcgaaagctattttgaaagtctgggtgctgtcgaaacagagacctctcagcaggaaaactggtttgcccgcatcgcaaacgcttatacggactttcgtgaaatgcaaaatcggctgcacgccactgacgtgccgttggctcaagacgctgaggcagtggcccggatcaagaagctgttagatgcactgaaaggcctgcaattattcattaagcctcttttggatactggcgaagaagcagagaaagatgaacggttctatggggactttaccgaattctggaacgagttagacactatcacgccattgtacaatatggtacggaactatctcacgcgtaagccttatagtgaagaaaaaatcaagctcaatttccagaatccgacattactgaacggttgggatttgaacaaagaggtagataatacatctgtcatcctccgccggaatggtcgttattatcttgccatcatgcaccgcaaccaccggcgtgtattttcacagtatccaggcacagaacgtggcgattgttatgagaaaatggaatataaactgcttccgggcgccaacaagatgctcccaaaagtcttcttctctaaatcacgcatcgatgaattcaaccctagcgaagaattattagcacgttaccagcaaggtacccacaagaagggtgagaattttaatttacacgactgccatgccttgattgatttttttaaagactctattgagaaacatgaagaatggcgtaactttcattttaaatttagtgatacgtccagttacaccgacatgagcggcttttatcgtgaaatcgaaacacagggttacaagttgtcatttgtgccagtggcgtgtgaatacatcgatgagttggtacgtgatggcaaaatctttttgttccagatctataataaggacttttcgacctactctaagggcaagccaaatatgcacactctttattgggaaatgcttttcgacgagcggaacctgatgaacgtggtgtataaactcaatggccaagcagagatcttttttcgtaaagcatcactgagcgcacgtcaccctgagcacccggcagggttgccaattaaaaaaaaacaggccccgacggaagaatcttgtttcccatatgatctcattaagaataagcggtatacagttgaccagtttcagtttcacgtgccaattactattaattttaaagcaactgggacttcaaatatcaacccgtcggtcactgattatattcgtacggccgatgacctccatatcattggcattgatcgcggtgagcgccatttactttatttagtggtgattgactcacaagggcgcatctgtgaacagttttccttaaacgagatcgtaacgcaataccaaggtcaccagtaccgtacagattatcatgctctcttgcagaaaaaagaggatgaacggcaaaaagctcgccagtcttggcaatcgatcgaaaacatcaaggaattaaaagaggggtatctgagccaagtagtgcacaaggtttctgaactgatgatcaaatataaagcaattgtggtgttggaagatttaaatgctgggttcaagcggagtcggcagaaggttgaaaagcaagtgtatcaaaaatttgagaagatgctgatcgacaaacttaactatcttgtgttcaagaccgcagaagctgaccaacctggcggcctcctgcacgcataccaattaacaaataaatttgagtcattcaagaaaatggggaagcaaagtggcttcctcttctacattcctgcatggaacacgtctaaaatcgacccgaccacgggctttgtcaacctttttgatacccggtatgagaacgtagacaaatcccgtgccttcttcggcaaattcgatagcatccgctaccgtgcggacaagggcacgttcgagtggacgttcgattataataactttcacaaaaaggccgaaggtacgcggtcgagctggtgtttgtcttctcatggtaaccgggtccgtactttccgcaatcctgcgaaaaacaaccaatgggacaacgaagagatcgacttaacacaagcgttccgcgatctgtttgaagcttgggggatcgagatcacttcgaacttaaaagaggccatttgcaaccagtctgagaagaaattcttttctgagcttttcgaactgttcaaacttatgatccagctgcggaactcagtgacaggcacgaatatcgactatatggtgagcccagtcgagaatcactacggcacgttcttcgattcgcgcacatgcgattcgtctctgccggctaacgctgacgctaatggtgcttataatattgcccgtaaggggttaatgctggctcgccgcattcaggctacccctgagaatgatccgatctccttaacattgagcaacaaagagtggttacgctttgcacaggggctcgatgagacaacaacctacgaggcggccgcaaaaaggccggcggccacgaaaaaggccggccaggcaaaaaagaaaaaggctagcggcagcggcgccggatccccaaagaagaaaaggaaggttgaagaccccaagaaaaagaggaaggtgtgataa

SEQ ID NO: 31 - RNA, 9 nt, Artificial Sequence
  Description of Artificial Sequence: Synthetic oligonucleotide
aauuucuac

SEQ ID NO: 32 - RNA, 10 nt, Artificial Sequence
  Description of Artificial Sequence: Synthetic oligonucleotide
gaauuucuac

SEQ ID NO: 33 - protein, 17 aa, Artificial Sequence
  Description of Artificial Sequence: Synthetic peptide
RKCLQAGMNLEARKTKK

SEQ ID NO: 34 - protein, 9 aa, Artificial Sequence
  Description of Artificial Sequence: Synthetic peptide
PAAKKKKLD

SEQ ID NO: 35 - protein, 7 aa, Artificial Sequence
  Description of Artificial Sequence: Synthetic peptide
PKKKRKV

SEQ ID NO: 36 - protein, 16 aa, Artificial Sequence
  Description of Artificial Sequence: Synthetic peptide
KRPAATKKAGQAKKKK

SEQ ID NO: 37 - protein, 9 aa, Artificial Sequence
  Description of Artificial Sequence: Synthetic peptide
PAAKRVKLD

SEQ ID NO: 38 - protein, 11 aa, Artificial Sequence
  Description of Artificial Sequence: Synthetic peptide
RQRRNELKRSP

SEQ ID NO: 39 - protein, 38 aa, Artificial Sequence
  Description of Artificial Sequence: Synthetic polypeptide
NQSSNFGPMKGGNFGGRSSGPYGGGGQYFAKPRNQGGY

SEQ ID NO: 40 - protein, 42 aa, Artificial Sequence
  Description of Artificial Sequence: Synthetic polypeptide
RMRIZFKNKGKDTAELRRRRVEVSVELRKAKKDEQILKRRNV

SEQ ID NO: 41 - protein, 8 aa, Artificial Sequence
  Description of Artificial Sequence: Synthetic peptide
VSRKRPRP

SEQ ID NO: 42 - protein, 1362 aa, Artificial Sequence
  Description of Artificial Sequence: Synthetic polypeptide
MGHHHHHHSSGLVPRGSGTMKNMESFINLYPVSKTLRFELKPIGKTLETFSRWIEELKEKEAIELKETGNLLAQDEHRAESYKKVKKILDEYHKWFITESLQNTKLNGLDVFYHNYMLPKKEDHEKKAFASCQDNLRKQIVNAFRQETGLFNKLSGKELFKDSKEEVALLKAIVPYFDNKTLENIGVKSNEGALLLIEEFKDFTTYFGGFHENRKNMYSDEAKSTAVAFRLIHENLPRFIDNKKVFEEKIMNSELKDKFPEILKELEQILQVNEIEEMFQLDYFNDTLIQNGIDVYNHLIGGYAEEGKKKIQGLNEHINLYNQIQKEKNKRIPRLKPLYKQILSDRETASFVIEAFENDGELLESLEKSYRLLQQEVFTPEGKEGLANLLAAIAESETHKIFLKNDLGLTEISQQIYESWSLIEEAWNKQYDNKQKKVTETETYVDNRKKAFKSIKSFSIAEVEEWVKALGNEKHKGKSVATYFKSLGKTDEKVSLIEQVENNYNIIKDLLNTPYPPSKDLAQQKDDVEKIKNYLDSLKALQRFIKPLLGSGEESDKDAHFYGEFTAFWDVLDKVTPLYNKVRNYMTKKPYSTEKFKLNFENSYFLNGWAQDYETKAGLIFLKDGNYFLAINNKKLDEKEKKQLKTNYEKNPAKRIILDFQKPDNKNIPRLFIRSKGDNFAPAVEKYNLPISDVIDIYDEGKFKTEYRKINEPEYLKSLHKLIDYFKLGFSKHESYKHYSFSWKKTHEYENIAQFYHDVEVSCYQVLDENINWDSLMEYVEQNKLYLFQIYNKDFSPNSKGTPNMHTLYWKMLFNPDNLKDVVYKLNGQAEVFYRKASIKKENKIVHKANDPIDNKNELNKKKQNTFEYDIVKDKRYTVDKFQFHVPITLNFKAEGLNNLNSKVNEYIKECDDLHIIGIDRGERHLLYLSLIDMKGNIVKQFSLNEIVNEHKGNTYRTNYHNLLDKREKEREKERESWKTIETIKELKEGYISQVVHKITQLMIEYNAIVVLEDLNFGFKRGRFKVEKQVYQKFEKMLIDKLNYLVDKKKEANESGGTLKAYQLTDSYADFMKYKKKQCGFLFYVPAWNTSKIDPTTGFVNLFDTHYVNVSKAQEFFSKFKSIRYNAANNYFEFEVTDYFSFSGKAEGTKQNWIICTHGTRIINFRNPEKNSQWDNKEVVITDEFKKLFEKHGIDYKNSSDLKGQIASQSEKAFFHNEKKDTKDPDGLLQLFKLALQMRNSFIKSEEDYLVSPVMNDEGEFFDSRKAQPNQPENADANGAYNIAMKGKWVVKQIRESEDLDKLKLAISNKEWLNFAQRSAAAKRPAATKKAGQAKKKKASGSGAGSPKKKRKVEDPKKKRKV

SEQ ID NO: 43 - DNA, 4092 bp, Artificial Sequence
  Description of Artificial Sequence: Synthetic polynucleotide
atgggccaccatcatcatcatcatagcagcggcctggtgccgcgcggcagcggtaccatgaagaacatggagtcttttattaatttatatccggtttcgaaaactttacgttttgagttaaagcctattggcaaaacactcgaaactttctcccgctggatcgaagagttgaaagagaaagaggctattgagctgaaagaaactggcaacctgttggcgcaggatgagcatcgggccgagtcttataagaaggtcaaaaaaattcttgacgaatatcataaatggttcatcactgaaagcctccagaacacaaagttaaatgggttggacgttttttatcataactatatgctcccgaagaaagaggaccatgagaagaaagcttttgcttcgtgtcaagataatctccgtaagcaaattgtaaacgcgtttcgtcaagaaaccggtttatttaacaaactgtcaggcaaagaactgtttaaagattcgaaggaagaggttgcactgttgaaagccattgtaccgtatttcgataacaagactctggaaaacattggtgttaagagtaatgaaggggctctccttttaattgaagagttcaaggattttaccacgtatttcggtggcttccatgagaatcgcaaaaatatgtatagcgacgaagcaaaatcaacagcggttgcctttcgtcttattcacgaaaatttgccgcgcttcattgacaataagaaggtcttcgaagagaaaatcatgaatagtgaattaaaggataaatttccagagattttgaaggagctggaacagattctgcaagtcaacgagattgaagagatgtttcagctcgactattttaacgacacattgatccagaatggcatcgatgtctataaccatttgatcggcggctacgccgaggaaggcaagaaaaaaattcaagggcttaacgagcatattaacctctataaccagatccagaaggagaagaataagcgtatcccgcggctgaaaccactctataagcaaattttgagtgatcgcgaaaccgcctcatttgttatcgaggcgtttgagaacgatggcgagttattagaatcattggagaagtcatatcgcttactgcagcaggaggtctttacgcctgaaggtaaagaaggtctggcgaatttactcgcagcaatcgctgaaagcgagacacacaagatctttctgaagaacgacttgggtctcaccgagatctctcaacaaatttatgaatcatggtcgctgattgaagaggcatggaataaacaatatgacaacaaacagaagaaagttacggagacagagacatatgtggacaatcggaaaaaggctttcaagtccatcaagagctttagcatcgcagaggttgaggaatgggtgaaagcacttgggaatgagaaacacaagggcaaaagcgtggcaacctattttaaaagtctcgggaagactgacgaaaaagttagccttattgaacaggtagagaacaattataatatcatcaaggaccttttgaacacaccgtatcctccttcgaaggacttggcccagcaaaaagatgacgttgaaaaaatcaaaaattatttggactctctgaaggccctccagcggttcattaagccattgttgggtagcggggaggaatccgataaagatgcgcacttttatggtgagtttaccgctttctgggatgtgctcgacaaagtaaccccactctacaataaagtccgcaactatatgactaagaaaccttatagcacagagaaatttaagctgaattttgaaaatagttactttttgaatggttgggcacaggactacgagacaaaagcggggcttatcttcttgaaggacggcaattacttccttgccatcaataataagaaattagatgaaaaggagaaaaaacagctcaagactaattatgagaagaatcctgcgaagcgtatcatcttagactttcagaagccagacaataagaacattcctcgcttgttcattcgcagtaaaggcgacaatttcgctcctgcagtagaaaagtataatcttccgatctctgacgttattgacatctatgacgaggggaagtttaagactgagtatcgcaaaattaacgagccggaatatctcaaatctctccataagctgattgactacttcaaacttgggttctccaagcatgaatcctacaagcattattctttttcatggaagaaaacacatgagtatgagaacatcgcccagttttaccacgacgtggaggtctcttgctatcaggtgctcgacgaaaatattaactgggattccctcatggagtatgtagaacagaacaaattgtacttgttccagatttataacaaagacttctccccaaactcgaaaggcactccgaatatgcacactttgtactggaagatgttgtttaatccggataatcttaaggacgtggtctataagctgaacggtcaggctgaagtattctaccggaaggcgagtattaagaaagaaaacaagattgtccacaaggcgaacgaccctattgacaataaaaacgagttgaataagaaaaagcaaaatacatttgaatacgacatcgtcaaagataaacggtatacagtggataagtttcaattccatgttcctatcacgctcaactttaaagctgaaggcctgaataacttgaatagcaaagttaacgaatacatcaaagagtgtgacgaccttcacattattggcatcgaccggggtgaacggcacctcttgtatctgagcctcatcgatatgaaaggtaacattgtaaagcaatttagtcttaacgagatcgttaatgagcacaaggggaacacgtaccgcacgaactatcataacctcttggacaaacgtgaaaaggaacgtgaaaaagagcgcgagtcatggaaaaccattgagaccatcaaagagctgaaagaaggctatattagtcaagtagtacataaaatcactcagttaatgatcgaatataatgcgatcgttgtactcgaagacctgaatttcggcttcaaacgcggccggttcaaggtggagaagcaagtgtatcaaaaatttgagaagatgttaattgataaactgaactacttggtcgataagaagaaggaagccaatgagagtggcgggacactcaaagcctaccagcttaccgatagttacgctgacttcatgaagtacaagaaaaagcaatgcggcttcctgttttatgtcccggcctggaacacttccaaaatcgatcctactactgggttcgtgaatctgtttgacacacattatgtcaatgttagtaaggcccaggaatttttctcgaaattcaagtcaattcgctacaacgcggccaacaactatttcgagtttgaagtaacagattatttttccttcagtggtaaagctgagggcaccaagcagaattggatcatttgcacccatggcacccgcattatcaattttcgtaacccggaaaaaaattcgcagtgggataataaggaagtagtgatcacagatgaattcaagaaactgtttgagaagcacggcattgactacaaaaatagttccgacctcaaggggcagatcgcctctcaatcggagaaggcgttttttcataacgaaaaaaaagatacaaaggacccagatggccttctgcagctttttaaactggcgctgcagatgcggaactctttcattaagagcgaagaggactacttagtatctcctgtgatgaacgacgaaggtgaattctttgactcgcgcaaagcccagcctaatcagccagagaacgctgatgctaatggggcgtacaatattgcaatgaaagggaaatgggttgttaagcaaatccgcgaatcggaggacctcgacaagctgaaactggcaatctcaaataaagaatggttgaacttcgcccagcgctccgcggccgcaaaaaggccggcggccacgaaaaaggccggccaggcaaaaaagaaaaaggctagcggcagcggcgccggatccccaaagaagaaaaggaaggttgaagaccccaagaaaaagaggaaggtgtgataa

SEQ ID NO: 44 - protein, 12 aa, Artificial Sequence
  Description of Artificial Sequence: Synthetic peptide
SALIKKKKKMAP

SEQ ID NO: 45 - protein, 5 aa, Artificial Sequence
  Description of Artificial Sequence: Synthetic peptide
DRLRR

SEQ ID NO: 46 - protein, 7 aa, Artificial Sequence
  Description of Artificial Sequence: Synthetic peptide
PKQKKRK

SEQ ID NO: 47 - protein, 10 aa, Artificial Sequence
  Description of Artificial Sequence: Synthetic peptide
RKLKKKIKKL

SEQ ID NO: 48 - protein, 10 aa, Artificial Sequence
  Description of Artificial Sequence: Synthetic peptide
REKKKFLKRR

SEQ ID NO: 49 - protein, 20 aa, Artificial Sequence
  Description of Artificial Sequence: Synthetic peptide
KRKGDEVDGVDEVAKKKSKK

SEQ ID NO: 50 - RNA, 20 nt, Artificial Sequence
  Description of Artificial Sequence: Synthetic oligonucleotide
uaauuucuacucuuguagau

SEQ ID NO: 51-54 - skipped (4 entries)

SEQ ID NO: 55 - protein, 1314 aa, Artificial Sequence
  Description of Artificial Sequence: Synthetic polypeptide
MGHHHHHHSSGLVPRGSGTMKNILEQFVGLYPLSKTLRFELKPLGKTLEHIEKKGLIAQDEQRAEEYKLVKDIIDRYHKAFIHMCLKHFKLKMYSEQGYDSLEEYRKLASISKRNEKEEQQFDKVKENLRKQIVDAFKNGGSYDDLFKKELIQKHLPRFIEGEEEKRIVDNFNKFTTYFTGFHENRKNMYSDEKESTAIAYRLIHENLPLFLDNMKSFAKIAESEVAARFTEIETAYRTYLNVEHISELFTLDYFSTVLTQEQIEVYNNIIGGRVDDDNVKIQGLNEYVNLYNQQQKDRSKRLPLLKSLYKMILSDRIAISWLPEEFKSDKEMIEAINNMHDDLKDILAGDNEDSLKSLLQHIGQYDLSKIYIANNPGLTDISQQMFGCYDVFTNGIKQELRNSITPSKKEKADNEIYEERINKMFKSEKSFSIAYLNSLPHPKTDAPQKNVEDYFALLGTCNQNDEQPINLFAQIEMARLVASDILAGRHVNLNQSENDIKLIKDLLDAYKALQHFVKPLLGSGDEAEKDNEFDARLRAAWNALDIVTPLYNKVRNWLTRKPYSTEKIKLNFENAQLLGGWDQNKEPDCTSVLLRKDGMYYLAIMDKKANHAFDCDCLPSDGACFEKIDYKLLPGANKMLPKVFFSKSRIKEFSPSESIIAAYKKGTHKKGPNFSLSDCHRLIDFFKASIDKHEDWSKFRFRFSDTKTYEDISGFYREVEQQGYMLGFRKVSEAFVNKLVDEGKLYLFHIWNKDFSKHSKGTPNLHTIYWKMLFDEKNLTDVIYKLNGQAEVFYRKKSLDLNKTTTHKAHAPITNKNTQNAKKGSVFDYDIIKNRRYTVDKFQFHVPITLNFKATGRNYINEHTQEAIRNNGIEHIIGIDRGERHLLYLSLIDLKGNIVKQMTLNDIVNEYNGRTYATNYKDLLATREGERTDARRNWQKIENIKEIKEGYLSQVVHILSKMMVDYKAIVVLEDLNTGFMRNRQKIERQVYEKFEKMLIDKLNCYVDKQKDADETGGALHPLQLTNKFESFRKLGKQSGWLFYIPAWNTSKIDPVTGFVNMLDTRYENADKARCFFSKFDSIRYNADKDWFEFAMDYSKFTDKAKDTYTWWTLCSYGTRIKTFRNPAKNNLWDNEEVVLTDEFKKVFAAAGIDVHENLKEAICALTDKKYLEPLMRLMTLLVQMRNSATNSETDYLLSPVADESGMFYDSREGKETLPKDADANGAYNIARKGLWTIRRIQATNCEEKVNLVLSNREWLQFAQQKPYLNDAAAKRPAATKKAGQAKKKKASGSGAGSPKKKRKVEDPKKKRKV

SEQ ID NO: 56 - DNA, 3948 bp, Artificial Sequence
  Description of Artificial Sequence: Synthetic polynucleotide
atgggccaccatcatcatcatcatagcagcggcctggtgccgcgcggcagcggtaccatgaagaacatcttagagcagtttgtcggcttatatccgttgtctaaaacacttcggtttgagcttaaacctttgggtaagacgttggaacatattgagaaaaaaggcttgattgcccaagacgaacagcgggcggaggagtacaaattggttaaagatattattgatcgctaccacaaggcttttattcatatgtgcttaaaacattttaagctcaagatgtacagtgaacaagggtatgatagcttggaggagtaccgcaagcttgcgtcaatttccaaacgcaacgagaaagaggagcagcaatttgacaaagtcaaggaaaatcttcgtaagcaaattgtcgacgcgtttaaaaatggcgggagttatgatgatctgtttaagaaagaattgatccagaaacacctcccacgttttattgagggtgaagaagaaaaacgtatcgttgacaacttcaacaagttcacgacctattttactggttttcatgaaaatcgcaagaatatgtatagtgacgaaaaggaatcgacggctattgcttatcgtctcattcacgaaaacttgccattgtttttggataacatgaagagcttcgctaagatcgccgaatcggaagtggctgctcgttttaccgaaatcgaaaccgcttaccggacatacttgaacgtagaacacattagtgaactgttcaccctcgactattttagcacggttttgacgcaagaacaaatcgaagtatataataacattatcggcgggcgcgtcgacgacgacaacgtaaagatccaagggttgaatgagtacgtaaatttatataatcagcagcagaaggaccggtctaagcgcttaccgcttcttaagtccctctacaaaatgatcttatccgatcgtattgcaatttcgtggttacctgaggagttcaaatccgataaggagatgattgaagcaattaacaacatgcatgacgacctgaaggacattctggcaggcgacaacgaagactcgcttaagtccttactgcagcatattggccaatacgatctctcgaaaatctacattgcgaacaatccgggcctgacagatatctcacaacaaatgttcgggtgttatgacgtctttactaatgggatcaagcaggagctccggaacagtattaccccttcaaaaaaggagaaagccgataacgaaatctacgaggagcggattaacaaaatgtttaaaagtgagaagagtttctcaattgcctacctgaattcgttgccgcacccaaagacggatgcgcctcaaaaaaatgttgaggattattttgctctcctggggacttgcaatcaaaacgatgaacagccgattaatttgtttgcccaaattgagatggcacgcttagtcgcctctgatattctcgcaggccggcacgttaatttgaaccaatctgagaatgatatcaagttaatcaaggatctgttagatgcttacaaggctctgcagcatttcgtcaaaccactccttggctcgggtgacgaggctgagaaagataacgagttcgatgcacgcctccgtgcggcttggaatgcgttggacattgttacaccactctataacaaggttcggaactggctgacccgcaaaccatattctacagaaaaaatcaagcttaatttcgaaaacgcccaacttctggggggttgggatcagaacaaagaaccggattgcacatcagtcctccttcggaaggatgggatgtactatttagcgatcatggataaaaaggcgaatcacgcctttgactgtgactgcttaccgtctgacggggcctgtttcgagaaaattgactacaagctgctcccgggcgcgaataaaatgttgccgaaagtttttttttctaaaagccgcatcaaagaattttccccttcggaatcgatcatcgctgcttataaaaaggggactcataaaaaagggccgaatttcagtctctctgattgtcatcgcttgattgacttttttaaggctagcattgataagcacgaagattggtcaaaatttcgttttcgcttctcagataccaaaacgtatgaagacatcagtggtttctaccgtgaagtagaacagcaaggctatatgctgggttttcgtaaagtctctgaggcctttgtgaataaactcgttgatgaaggtaagttatacttattccatatctggaacaaagactttagtaagcactccaaaggtacacctaatctccacactatttattggaaaatgctcttcgatgagaaaaatctcactgacgtcatctacaaactgaatgggcaggctgaagtattctaccgtaaaaaaagtctggatcttaataagacaactactcacaaggcacatgccccaatcaccaataaaaatacccaaaacgcaaagaagggtagtgttttcgattacgatatcatcaaaaatcgtcgctacacagtggacaaattccagttccacgtccctatcaccttaaattttaaggcaacaggtcgtaattacattaatgagcacactcaagaggcaatccgtaataatggcatcgaacatatcattggcatcgaccgtggggagcgtcacttgctttacttgtcgctcattgatctgaagggtaatatcgtcaagcagatgacccttaatgatattgtcaatgaatataatggtcggacttatgcgacgaactacaaggacttgctggcaacacgggagggtgagcgtacggacgctcggcgcaactggcagaagattgaaaatattaaagaaatcaaggaaggttaccttagccaggtggtgcacatcttgagtaaaatgatggtcgactacaaggctatcgttgttctggaagacttgaatacaggcttcatgcggaatcgtcaaaaaatcgaacgtcaagtatatgagaagttcgaaaaaatgttaattgacaagctgaactgctatgttgacaaacaaaaggatgctgacgagacgggcggtgccctccacccgctgcagctgacaaacaaatttgagtcgtttcgtaagttaggtaagcagagtggttggcttttttacatcccagcatggaacacttcgaaaatcgacccagttactgggttcgtgaacatgttagacacgcgctacgagaacgccgataaggcgcggtgtttcttctcgaaattcgattccatccggtataacgctgacaaagattggtttgagtttgctatggattacagtaagttcactgataaagcgaaagatacttacacgtggtggactctgtgttcctatgggacgcgtattaaaacttttcgtaatccggctaagaataatttgtgggataatgaggaggttgtccttactgatgagttcaagaaagttttcgcagcggcaggtattgatgtccatgagaaccttaaggaagcgatctgtgctctgacagataaaaagtatcttgaaccactcatgcgtctcatgaccctgctcgttcaaatgcggaactctgctactaactccgaaacagactatttactttcaccagttgctgacgagtcagggatgttctatgactcccgcgaagggaaggaaacactgccaaaagatgcggacgccaacggtgcatataacattgcccgtaagggcctctggaccatccggcggattcaagccaccaactgtgaggagaaagttaacttagtcctcagtaatcgtgaatggttgcagtttgcccagcagaaaccatatctgaatgatgcggccgcaaaaaggccggcggccacgaaaaaggccggccaggcaaaaaagaaaaaggctagcggcagcggcgccggatccccaaagaagaaaaggaaggttgaagaccccaagaaaaagaggaaggtgtgataa

SEQ ID NO: 57-67 - skipped (11 entries)

SEQ ID NO: 68 - protein, 1333 aa, Artificial Sequence
  Description of Artificial Sequence: Synthetic polypeptide
MGHHHHHHSSGLVPRGSGTMIYRENFKRKKEKIEMNTGFNDFTNLSSVTKTLCNRLIPTEITAKYIKEHGVIEADQERNMMSQELKNILNDFYRSFLNENLVKVHELDFKPLFTEMKKYLETKDNKEALEKAQDDMRKAIHDIFESDDRYKKMFKAEITASILPEFILHNGAYSAEEKEEKMQVVKMFNGFMTSFSAFFTNRENCFSKEKISSSACYRIVDDNAKIHFDNIRIYKNIANKFDYEIEMIEKIEEAAGGADIRNIFSYNFDHFAFNHFVSQDDISFYNYVVGGINKFMNLYCQATKEKLSPYKLRHLHKQILCIEESLYDVPAKFNCDEDVYAAVNDFLNNVRTKSVIERLQMLGKNADSYDLDKIYISKKHFTNISQTLYRDFSVINTALTMSYIDTLPGKGKTKEKKAASMAKNTELISLGEIDKLVDKYNLCPDKAASTRSLIRSISDIVADYKANPLTMNSGIPLAENETEIAVLKEAIEPFMDIFRWCAKFKTDEPVDKDTDFYTELEDINDEIHSIVSLYNRTRNYVTKKPYNTDKFGLYFGTSSFASGWSESKEFTNNAILLAKDDKFYLGVFNAKNKPAKSIIKGHDTIQDGDYKKMVYSLLTGPNKMLPHMFISSSKAVPVYGLTDELLSDYKKGRHLKTSKNFDIDYCHKLIDYFKHCLALYTDWDCFNFKFSDTESYNDIGEFYKEVAEQGYYMNWTYIGSDDIDSLQENGQLYLFQIYNKDFSEKSFGKPSKHTAILRSLFSDENVADPVIKLCGGTEVFFRPKSIKTPVVHKKGSILVSKTYNAQEMDENGNIITVRKCVPDDVYMELYGYYNNSGTPLSAEALKYKDIVDHRTAPYDIIKDRRYTEDEFFINMPVSLNYKAENRRVNVNEMALKYIAQTKDTYIIGIDRGERNLLYVSVIDTDGNIVEQKSLNIINNVDYQAKLKQVEIMRKLARQNWKQGVKIADLKKGYLSQAVHEVAELVIKYNGIVVMEDLNSRFKEKRSKIERGVYQQFETSLIKTLNYLTFKDRKPLEAGGIANGYQLTYIPESLKNVGSQCGCILYVPAAYTSKIDPTTGFVTLFKFKDISSEKAKTDFIGRFDCIRYDAEKDLFAFEFDYDNFETYETCARTKWCAYTYGTRVKKTFRNRKFVSEVIIDITEEIKKTLAATDINWIDSHDIKQEIIDYALSSHIFEMFKLTVQMRNSLCESKDREYDKFVSPILNASGKFFDTDAADKSLPIEADANDAYGIAMKGLYNVLQVKNNWAEGEKFKFSRLSNEDWFNFMQKRAAAKRPAATKKAGQAKKKKASGSGAGSPKKKRKVEDPKKKRKV

SEQ ID NO: 69 - DNA, 4005 bp, Artificial Sequence
  Description of Artificial Sequence: Synthetic polynucleotide
atgggccaccatcatcatcatcatagcagcggcctggtgccgcgcggcagcggtaccatgatctaccgtgagaattttaagcggaaaaaggagaagattgaaatgaacactgggtttaatgacttcactaatttgagttccgtgaccaagacgttatgcaaccggttgatcccaacagaaattaccgcaaagtacattaaggagcatggggtaattgaggcggaccaagaacggaacatgatgagtcaagagctgaaaaatatcttgaatgacttttaccggagtttcctgaacgagaaccttgtgaaggtgcacgaacttgatttcaagccgttattcaccgagatgaaaaagtacctcgaaacaaaagataacaaggaagcactcgaaaaggcccaggacgacatgcggaaggcaatccatgatatctttgaaagtgatgaccgctacaaaaaaatgttcaaggctgagatcacggcgtcgattttgcctgaattcattcttcataacggggcatattcagccgaagaaaaggaggagaaaatgcaagtagtcaagatgttcaatggctttatgacgtctttctcagcattctttacgaatcgtgagaattgtttctccaaagaaaagatcagctcctccgcatgttaccgtattgttgatgacaacgcgaaaatccatttcgataacattcgtatttataaaaatatcgccaacaagttcgattatgaaattgaaatgatcgagaagatcgaagaggcggcggggggtgccgacattcgtaatatcttctcgtacaactttgaccactttgcattcaatcatttcgttagtcaagatgatatctcattctacaattatgttgttggtggtattaacaagtttatgaacttgtattgtcaagccaccaaagagaaattatcgccttataaactgcgtcaccttcacaaacagattctgtgtattgaggaaagcctctatgacgtgccagcgaagtttaattgtgatgaggacgtatatgcagctgtcaacgattttcttaataacgttcggacgaaatcagtaattgaacgcttgcaaatgctcggcaaaaatgcagacagttacgacctggataaaatttatatctctaaaaagcacttcaccaatatctctcaaactttatatcgcgacttctctgtgatcaacactgccctcactatgtcttatatcgatactcttccgggtaaggggaaaaccaaggaaaaaaaggcagcatcgatggccaaaaacaccgaacttatttcgttaggcgaaattgataagttggtggataaatataacctctgtccagataaggcagctagcactcgtagcctcattcggtctattagcgacatcgtcgctgactacaaggcaaaccctcttacaatgaatagtgggattccgttggcagagaacgagacagaaatcgcggtgttaaaagaggcgatcgagccttttatggatatcttccggtggtgtgctaagtttaaaaccgacgagcctgtcgataaggatacagatttctacacggagttagaagacattaacgatgaaatccatagtattgtcagtctttataaccggacccggaattatgtcactaaaaagccgtacaacacagataagttcggtctgtattttggcacttcgtcgttcgcatcgggttggagcgagagcaaagagtttactaacaacgcaattttgttagccaaggatgacaagttttacctcggcgtgttcaacgcaaaaaacaagccagcaaaatcgattatcaaagggcatgacacaatccaagatggtgattataagaaaatggtgtattcactgctcaccgggccaaataagatgcttcctcacatgtttatctcgagcagtaaagcggttcctgtttacgggctcactgacgagcttctcagcgactataagaaaggtcgccaccttaagacatccaagaatttcgacattgattactgtcacaaacttatcgattacttcaaacattgtctcgctttgtatactgattgggattgcttcaacttcaaattctctgatacggagtcctacaatgatatcggcgagttctacaaagaggttgccgagcaaggctactacatgaactggacatatatcgggtcggacgatatcgattcgctgcaggaaaacggccagctctatctttttcaaatttataacaaagatttcagcgaaaagtcattcggtaaaccgtctaaacatacggccatcctgcgtagcttattcagcgatgaaaacgtggccgacccagtcattaaactgtgtggggggaccgaagtttttttccggccgaagtctattaagacaccagtagtacataaaaaaggcagcatcctcgtatccaaaacctataacgcacaagaaatggacgagaatggtaatatcatcaccgtgcggaagtgtgttccagacgacgtctatatggagctctacggctattacaacaactctgggacgcctctgtccgccgaagctttgaaatacaaggatattgtggaccaccgcacggctccgtacgacattatcaaggaccggcgttacaccgaagacgaatttttcatcaacatgccggtgtcattgaattataaagcggaaaaccgccgtgttaatgtgaacgaaatggccttaaaatacatcgcacagaccaaggacacctacatcattggcatcgatcggggcgaacgtaatctgttgtatgtgagcgttatcgatactgacggcaatatcgttgagcaaaagagtctcaatatcatcaataacgtggattatcaagccaaattaaagcaagtggaaatcatgcgtaaactggcccgtcagaattggaagcagggggtaaagattgcagacctgaaaaagggctacctgtcacaagcggtacatgaagtcgcggaacttgtaattaaatacaacgggattgttgtaatggaggacttaaactcccgcttcaaagagaagcgttctaaaattgaacgcggcgtctaccaacagtttgagacatcattaatcaagacattgaattatttgacgttcaaagatcgcaaaccgttagaagccgggggcattgcgaatggttatcaattaacttatattccggagtctcttaaaaatgtgggctctcagtgcggctgtatcttgtatgtgccagcagcctacacctcgaagatcgaccctaccactggtttcgtcaccttgttcaaattcaaagacatttcgagcgagaaagctaaaacggattttattggtcggttcgactgcatccgttatgatgcagaaaaggaccttttcgcatttgaattcgattatgacaactttgagacttatgagacttgtgcgcgtaccaaatggtgtgcatatacatacgggactcgggtgaagaaaactttccggaatcggaaattcgtgtcagaggtgatcatcgacatcactgaagagatcaagaagacccttgcagcgaccgatattaattggattgacagtcacgacatcaaacaagagatcatcgactatgcccttagcagccatatttttgaaatgttcaaattaacggtacagatgcgtaacagcctttgcgagagtaaagatcgcgagtacgacaagttcgtctcacctattctcaacgcgtcgggcaaatttttcgacaccgatgccgctgataaaagtctgcctattgaagctgatgcgaacgatgcgtatggtattgctatgaaagggttgtataatgttttacaagtcaaaaacaactgggcggagggcgagaaatttaagttctcccgtttaagcaacgaagattggttcaacttcatgcaaaagcgggcggccgcaaaaaggccggcggccacgaaaaaggccggccaggcaaaaaagaaaaaggctagcggcagcggcgccggatccccaaagaagaaaaggaaggttgaagaccccaagaaaaagaggaaggtgtgataa

SEQ ID NO: 70-80 - skipped (11 entries)

SEQ ID NO: 81 - protein, 1297 aa, Artificial Sequence
  Description of Artificial Sequence: Synthetic polypeptide
MGHHHHHHSSGLVPRGSLQMTMDYGNGQFERRAPLTKTITLRLKPIGETRETIREQKLLEQDAAFRKLVETVTPIVDDCIRKIADNALCHFGTEYDFSCLGNAISKNDSKAIKKETEKVEKLLAKVLTENLPDGLRKVNDINSAAFIQDTLTSFVQDDADKRVLIQELKGKTVLMQRFLTTRITALTVWLPDRVFENFNIFIENAEKMRILLDSPLNEKIMKFDPDAEQYASLEFYGQCLSQKDIDSYNLIISGIYADDEVKNPGINEIVKEYNQQIRGDKDESPLPKLKKLHKQILMPVEKAFFVRVLSNDSDARSILEKILKDTEMLPSKIIEAMKEADAGDIAVYGSRLHELSHVIYGDHGKLSQIIYDKESKRISELMETLSPKERKESKKRLEGLEEHIRKSTYTFDELNRYAEKNVMAAYIAAVEESCAEIMRKEKDLRTLLSKEDVKIRGNRHNTLIVKNYFNAWTVFRNLIRILRRKSEAEIDSDFYDVLDDSVEVLSLTYKGENLCRSYITKKIGSDLKPEIATYGSALRPNSRWWSPGEKFNVKFHTIVRRDGRLYYFILPKGAKPVELEDMDGDIECLQMRKIPNPTIFLPKLVFKDPEAFFRDNPEADEFVFLSGMKAPVTITRETYEAYRYKLYTVGKLRDGEVSEEEYKRALLQVLTAYKEFLENRMIYADLNFGFKDLEEYKDSSEFIKQVETHNTFMCWAKVSSSQLDDLVKSGNGLLFEIWSERLESYYKYGNEKVLRGYEGVLLSILKDENLVSMRTLLNSRPMLVYRPKESSKPMVVHRDGSRVVDRFDKDGKYIPPEVHDELYRFFNNLLIKEKLGEKARKILDNKKVKVKVLESERVKWSKFYDEQFAVTFSVKKNADCLDTTKDLNAEVMEQYSESNRLILIRNTTDILYYLVLDKNGKVLKQRSLNIINDGARDVDWKERFRQVTKDRNEGYNEWDYSRTSNDLKEVYLNYALKEIAEAVIEYNAILIIEKMSNAFKDKYSFLDDVTFKGFETKLLAKLSDLHFRGIKDGEPCSFTNPLQLCQNDSNKILQDGVIFMVPNSMTRSLDPDTGFIFAINDHNIRTKKAKLNFLSKFDQLKVSSEGCLIMKYSGDSLPTHNTDNRVWNCCCNHPITNYDRETKKVEFIEEPVEELSRVLEENGIETDTELNKLNERENVPGKVVDAIYSLVLNYLRGTVSGVAGQRAVYYSPVTGKKYDISFIQAMNLNRKCDYYRIGSKERGEWTDFVAQLINAAAKRPAATKKAGQAKKKKASGSGAGSPKKKRKVEDPKKKRKV

SEQ ID NO: 82 - DNA, 3897 bp, Artificial Sequence
  Description of Artificial Sequence: Synthetic polynucleotide
atgggccaccatcatcatcatcatagcagcggcctggtgccgcgcggcagcctgcagatgacaatggattacggtaacggtcaatttgagcggcgcgccccgctcaccaagacaatcactctccggttgaaaccgatcggggagacccgtgagacgattcgcgagcaaaagctcctcgaacaagatgctgcattccgtaaacttgttgaaactgtcacccctatcgtggatgattgtatccggaaaattgctgacaacgctttgtgtcattttggcacggaatatgatttctcctgtttaggtaatgccatctcaaaaaatgacagcaaagcgattaagaaagagaccgaaaaagtagagaagctgttggccaaggttctgacagagaacttgccagacggtctgcgtaaagtcaacgatattaacagcgcggcttttattcaggacacactgacatcattcgtccaggacgatgctgacaaacgtgtgttaattcaagagttaaagggcaaaactgtgttaatgcaacgctttttaacaacccggattactgcattgactgtatggctccctgaccgggtgtttgagaacttcaacatttttatcgaaaatgctgaaaagatgcgcatcttgctcgactcaccattgaatgaaaagatcatgaagttcgatccggatgctgaacaatacgcgagtttggaattctatggtcaatgtctgtcccagaaggatattgattcgtacaacctcatcatttccgggatttatgccgatgatgaggtcaagaacccaggtatcaatgaaattgttaaggaatacaaccagcaaattcgcggggataaggatgagtcacctttacctaaactgaaaaagttgcataaacaaattttgatgcctgtcgagaaggcatttttcgttcgggtactcagtaatgattctgatgctcgttcaattttagaaaaaatcttgaaggatactgagatgttgccttctaagatcattgaagcgatgaaagaagcagacgctggggacatcgctgtatatggttcacgtttgcacgagttaagccacgtaatctatggcgatcacgggaagctctctcagattatctatgataaggagtcgaaacgcatcagcgagctcatggaaacgttatcgcctaaggagcgcaaagagtcaaagaaacgcttggagggtctggaagaacatatccggaagtcgacatataccttcgacgagcttaatcgttatgcggaaaagaacgtcatggctgcctacatcgcggccgtggaggaaagctgcgccgaaattatgcgtaaggagaaggacttacgcacgcttcttagtaaggaggatgtcaagattcgtggtaatcgccacaatacgttaattgttaagaactacttcaatgcctggactgtcttccggaatttgatccgcatcctccggcggaaatccgaggcggagatcgactcagatttctatgacgtcttggatgactctgtggaagttttatcgctcacatataaaggtgaaaacttgtgccggtcttacattacgaagaagatcgggagcgatttaaagccagagattgctacctatggttccgccttgcgccctaattcacggtggtggtcaccgggcgagaagtttaacgtaaagttccacaccattgttcgccgggacggtcgcctttattatttcatcttgccgaaaggtgccaaacctgtcgagctcgaagatatggatggggacatcgaatgcttgcaaatgcgcaagattccgaatccgactattttccttccaaaattggttttcaaggacccagaggccttcttccgcgacaatccagaggcagatgaattcgtttttctttcgggtatgaaagctccagtgaccatcacgcgtgaaacctatgaggcgtatcgctacaaactttatacagttgggaagttacgcgacggtgaagtgagcgaagaagagtataaacgtgcgttgttacaagtattgaccgcctataaggaattcttagagaatcggatgatctacgcagatctgaactttggctttaaagatctcgaagaatacaaagactcgtcagaatttatcaaacaagtcgaaactcacaacacttttatgtgctgggctaaggtcagtagcagtcagctcgacgacctggtcaagagcgggaacgggttactgttcgaaatctggtcagaacggttggagtcctattacaaatatggcaacgagaaggtgctgcgtgggtacgagggcgttcttttgagtatccttaaggacgagaacctcgtgagcatgcggacgctgcttaattctcggccgatgctcgtctaccgccctaaagaatcatccaagccgatggtcgttcaccgggacggtagccgcgtcgttgatcggttcgataaggatgggaagtatattccaccagaggtacacgacgaattataccggttctttaacaatttgcttattaaggaaaagctcggcgagaaagcgcgcaaaattttagacaacaaaaaagtaaaagtaaaggtattggaatctgaacgtgtaaagtggtcaaagttttatgatgaacagtttgcagttacattctctgttaaaaagaatgcagactgtctggataccacgaaagatctcaatgccgaagttatggagcagtattccgaatcgaaccggcttatcctgatccgcaataccactgacatcttgtattatcttgtacttgataagaatgggaaagtgctgaaacaacgctcattgaatatcattaacgacggggctcgcgacgttgattggaaagagcgttttcggcaggtaacaaaagatcgtaacgaaggctataacgagtgggactactcgcggactagcaacgatttgaaagaggtctatctgaattatgcattgaaggagattgccgaagcggtaatcgaatacaacgcaattttgattattgaaaaaatgtcgaatgccttcaaggataagtactcctttttggatgatgttaccttcaaaggttttgagaccaaacttcttgcgaagctctctgacttgcatttccggggtattaaagatggggagccatgttcgtttacgaacccgttacagttatgtcagaacgactcaaacaaaattttacaagacggtgtgattttcatggtccctaacagcatgacgcgcagtctggaccctgacactgggttcatttttgcgattaacgatcacaacatccgcactaagaaagcgaagttaaacttccttagtaaattcgatcagctgaaagtgtcatcagagggctgtttaatcatgaaatattcgggggactcccttcctacacacaacacagataatcgtgtatggaactgttgttgcaatcacccgatcaccaactacgaccgcgagacgaaaaaggtcgaattcatcgaggagccagtggaagagttgagtcgcgtcttagaagagaatgggattgagacagatacggaacttaacaagcttaacgagcgcgagaatgttccgggcaaggtagtagatgccatctattctctggtgttgaattacttgcgtggtaccgtgtccggcgttgcaggccaacgggcggtctactattcccctgtgacggggaaaaaatatgatatttcgtttatccaagcaatgaatctgaatcgtaagtgcgattactaccggatcgggagcaaagaacgcggcgaatggacggattttgtagcgcagttaattaacgcggccgcaaaaaggccggcggccacgaaaaaggccggccaggcaaaaaagaaaaaggctagcggcagcggcgccggatccccaaagaagaaaaggaaggttgaagaccccaagaaaaagaggaaggtgtgataa

SEQ ID NO: 83-93 - skipped (11 entries)

SEQ ID NO: 94 - protein, 1368 aa, Artificial Sequence
  Description of Artificial Sequence: Synthetic polypeptide
MGHHHHHHSSGLVPRGSGTMCYDLNNIKTKLREREVETMGNNMDNSFEPFIGGNSVSKTLRNELRVGSEYTGKHIKECAIIAEDAVKAENQYIVKEMMDDFYRDFINRKLDALQGINWEQLFDIMKKAKLDKSNKVSKELDKIQESTRKEIGKIFSSDPIYKDMLKADMISKILPEYIVDKYGDAASRIEAVKVFYGFSGYFIDFWASRKNVFSDKNIASAIPHRIVNVNARIHLDNITAFNRIAEIAGDEVAGIAEDACAYLQNMSLEDVFTGACYGEFICQKDIDRYNNICGVINQHMNQYCQNKKISRSKFKMERLHKQILCRSESGFEIPIGFQTDGEVIDAINSFSTILEEKDILDRLRTLSQEVTGYDMERIYVSSKAFESVSKYIDHKWDVIASSMYNYFSGAVRGKDDKKDVKIQTEIKKIKSCSLLDLKKLVDMYYKMDGMCLEHEATEYVAGITEILVDFNYKTFDMDDSVKMIQNEHMINEIKEYLDTYMSIYHWAKDFMIDELVDRDMEFYSELDEIYYDLSDIVPLYNKVRNYVTQKPYSQDKIKLNFGSPTLANGWSKSKEFDNNVVVLLRDEKIYLAILNVGNKPSKDIMAGEDRRRSDTDYKKMNYYLLPGASKTLPHVFISSNAWKKSHGIPDEIMYGYNQNKHLKSSPNFDLEFCRKLIDYYKECIDSYPNYQIFNFKFAATETYNDISEFYKDVERQGYKIEWSYISEDDINQMDRDGQIYLFQIYNKDFAPNSKGMQNLHTLYLKNIFSEENLSDVVIKLNGEAELFFRKSSIQHKRGHKKGSVLVNKTYKTTEKTENGQGEIEVIESVPDQCYLELVKYWSEGGVGQLSEEASKYKDKVSHYAATMDIVKDRRYTEDKFFIHMPITINFKADNRNNVNEKVLKFIAENDDLHVIGIDRGERNLLYVSVIDSRGRIVEQKSFNIVENYESSKNVIRRHDYRGKLVNKEHYRNEARKSWKEIGKIKEIKEGYLSQVIHEISKLVLKYNAIIVMEDLNYGFKRGRFKVERQVYQKFETMLINKLAYLVDKSRAVDEPGGLLKGYQLTYVPDNLGELGSQCGIIFYVPAAYTSKIDPVTGFVDVFDFKAYSNAEARLDFINKLDCIRYDAPRNKFEIAFDYGNFRTHHTTLAKTSWTIFIHGDRIKKERGSYGWKDEIIDIEARIRKLFEDTDIEYADGHNLIGDINELESPIQKKFVGELFDIIRFTVQLRNSKSEKYDGTEKEYDKIISPVMDEEGVFFTTDSYIRADGTELPKDADANGAYCIALKGLYDVLAVKKYWKEGEKFDRKLLAITNYNWFDFIQNRRFAAAKRPAATKKAGQAKKKKASGSGAGSPKKKRKVEDPKKKRKV

SEQ ID NO: 95 - DNA, 4110 bp, Artificial Sequence
  Description of Artificial Sequence: Synthetic polynucleotide
atgggccaccatcatcatcatcatagcagcggcctggtgccgcgcggcagcggtaccatgtgctacgacttaaacaacatcaagacaaagttacgtgaacgcgaagtcgaaactatgggcaataacatggataatagcttcgagccttttattggcggtaatagtgtctctaaaacacttcggaatgagctgcgtgtaggttccgaatatactggtaaacacattaaagagtgcgcgatcattgcagaggacgccgtgaaggcggagaaccagtacatcgtaaaagagatgatggacgacttttaccgtgacttcattaatcgcaaacttgacgccttgcagggtattaattgggagcagctttttgacattatgaagaaggcgaaattggataagtcgaataaagtcagcaaagagttagacaagattcaagagtctacgcggaaagaaatcgggaaaatcttctcatccgatccaatctataaagacatgctcaaagcggacatgatcagcaaaattctgccagagtatattgtcgacaaatacggtgatgcagcctcgcggatcgaagctgtaaaggtgttttacggcttttcgggttattttatcgacttctgggcatcgcgcaagaacgtcttctcagataagaacatcgcgtcggccattccgcaccggattgtcaatgtgaacgctcggatccatctggacaacatcacggccttcaaccgtatcgcagaaattgcaggggatgaagtcgccggcattgctgaagatgcttgtgcttacctgcagaatatgagcttagaggatgtattcacgggggcctgctacggtgagttcatctgtcagaaggatattgatcgttacaataacatttgcggtgttatcaaccagcacatgaatcaatactgccaaaacaaaaagatctcacgctcaaaatttaagatggaacgtctgcacaaacagatcttatgtcgctctgagagtggttttgagatcccgattgggtttcaaaccgacggggaggtaatcgatgctatcaactccttttctacgattcttgaagagaaagatatcttggatcgtctgcgcactttgtcgcaggaggtaacaggttatgacatggagcgtatctatgtaagttccaaggcgtttgagtctgtatcaaagtacatcgatcacaaatgggacgtaattgcttcttccatgtacaattacttttctggggctgttcgtgggaaggacgacaagaaagatgtcaagattcagacggaaattaaaaagattaagtcatgttcgttattggacctcaaaaagctggtagatatgtattataaaatggatgggatgtgtttagagcacgaagcgacggagtacgtggcaggtattacggagatcctggttgactttaactataagaccttcgacatggatgattccgttaagatgattcaaaatgagcacatgattaatgaaattaaagaatatttagatacctatatgtctatctatcattgggcgaaggactttatgatcgatgagctcgtagatcgcgacatggaattctacagtgagctcgatgaaatctattatgatttgtccgacatcgtaccactgtataataaagtccgcaactacgtcacgcaaaaaccgtattcccaggataaaatcaagttaaactttggcagcccaaccttagcaaacggttggagcaagtcgaaagaatttgataacaacgttgtagtattgttgcgtgacgaaaagatttatctggccatcttaaatgtggggaataaaccgtcaaaggatatcatggcgggcgaagaccgtcgtcgctccgatactgattacaagaaaatgaattactatctgctccctggggcaagcaaaaccctgccacacgtttttatctcttcaaatgcatggaagaaatcccacggtatccctgacgagattatgtacggctataaccaaaataagcatttaaaatcttcgccaaacttcgacttagagttttgtcgcaagctgatcgattattacaaagaatgtattgacagctatcctaactatcagatcttcaatttcaaattcgccgctacggaaacttacaacgatatttcggagttctacaaagatgttgaacgtcaggggtacaagattgaatggtcgtacatttccgaggacgatattaatcagatggatcgtgacggccagatttatctttttcaaatctacaacaaggattttgccccaaactctaagggcatgcagaatttacatacactctatttaaaaaatattttttcagaggaaaacctctctgatgtcgtcattaaactgaatggcgaggctgagctcttcttccgcaagagctcgatccaacataaacgcggtcataagaagggtagtgtgttggtaaataagacctataaaaccacagaaaaaactgaaaatggtcaaggcgaaattgaagtaatcgagagcgtgccggaccagtgttacctggagcttgttaagtactggtcagagggtggtgtaggtcagttgtcagaagaggcttccaaatacaaagataaagtcagccactacgctgcaacaatggatattgtcaaggaccggcggtacacggaggataagttctttattcacatgccgattacgattaattttaaagctgataaccggaacaatgtcaacgagaaagtgctgaagtttattgcagaaaacgatgatctccacgttattggtattgaccgtggggaacgtaatctcctgtacgtctcagtaattgattcacgtgggcgtattgttgagcagaagtcgtttaatattgttgagaattacgagagcagtaaaaatgtgatccgccgccatgattatcgtgggaaattagtaaataaagagcactatcgtaatgaggcacgtaagagctggaaagaaatcggcaaaatcaaggagatcaaagaaggttatctcagtcaagttatccatgagattagtaagttggtattaaagtataacgccatcatcgtgatggaagatcttaattatggcttcaaacgcgggcggtttaaagtcgagcggcaggtataccagaagttcgagaccatgcttattaacaaattagcctacttagtggacaaatcacgcgcggtagacgaaccgggtgggttattaaaaggctaccagctgacatacgtgccagataacttgggtgaactggggtcccagtgcgggatcattttttatgtgccagcagcatacacttcgaaaatcgatcctgttacgggctttgtagacgtgtttgattttaaggcatactccaatgccgaagcacgtttagatttcatcaataaactggactgcatccggtatgacgcgccgcgtaacaagtttgaaattgctttcgactacggtaacttccggactcatcatacaacccttgcaaagactagctggactatttttattcacggcgaccgtattaaaaaggagcgcggttcttacggctggaaggacgaaattatcgatatcgaggcccgtattcgtaagctgtttgaagacacagacatcgaatacgccgatggtcacaatttgatcggtgacattaacgagctcgagagtccaattcaaaagaaattcgttggtgagctgttcgacattatccgtttcactgtccaactgcgcaacagcaaaagtgagaaatatgacggcaccgaaaaggagtatgacaaaattatttcgccggtaatggacgaggagggggttttctttacaaccgacagttatatccgcgcagatggtactgaattacctaaagatgctgatgctaacggggcctattgtatcgcgctgaagggtctttacgacgtgctcgcggtaaagaaatattggaaggagggggagaagttcgatcggaagttacttgccatcaccaattacaactggtttgatttcattcagaatcgtcgcttcgcggccgcaaaaaggccggcggccacgaaaaaggccggccaggcaaaaaagaaaaaggctagcggcagcggcgccggatccccaaagaagaaaaggaaggttgaagaccccaagaaaaagaggaaggtgtgataa

SEQ ID NO: 96-106 - skipped (11 entries)

SEQ ID NO: 107 - protein, 1525 aa, Artificial Sequence
  Description of Artificial Sequence: Synthetic polypeptide
MGHHHHHHSSGLVPRGSGTMSDRLDVLTNQYPLSKTLRFELKPVGATADWIRKHNVIRYHNGKLVGKDAIRFQNYKYLKKMLDEMHRLFLQQALVLEPNSNQAQELTALLRAIENNYCNNNDLLAGDYPSLSTDKTIKISNGLSKLTTDLFDKKFEDWAYQYKEDMPNFWRQDIAELEQKLQVSANAKDQKFYKGIIKKLKNKIQKSELKAETHKGLYSPTESLQLLEWLVRRGDIKLTYLEIGKENEKLNELVPLVELKDIHRNFNNFATYLSGFSKNRENVYSTKFDRRSGYKATSVIARTFEQNLMFCLGNIAKWHKVTEFINQANNYELLQEHGIDWNKQIAALEHKLDVCLAEFFALNNFSQTLAQQGIEKYNQVLAGIAEIAGQPKTQGLNELINLARQKLSAKRSQLPTLQLLYKQILSKGDKPFIDDFKSDQELIAELNEFVSSQIHGEHGAIKLINHELESFINEARAAQQQIYVPKDKLTELSLLLTGSWQAINQWRYKLFDQKQLDKQQKQYSFSLAQVERWLATEVEQQNFYQTEKERQQHKDTQPANVTTSSDGHSILTAFEQQVQTLLTNICVAAEKYRQLSDNLTAIDKQRESESSKGFEQIAVIKTLLDACNELNHFLARFTVNKKDKLPEDRAEFWYEKLQAYIDAFPIYELYNKVRNYLSKKPFSTEKVKINFDNSHFLSGWTADYERHSALLFKFNENYLLGVVNENLSSEEEEKLKLVGGEEHAKRFIYDFQKIDNSNPPRVFIRSKGSSFAPAVEKYQLPIGDIIDIYDQGKFKTEHKKKNEAEFKDSLVRLIDYFKLGFSRHDSYKHYPFKWKASHQYSDIAEFYAHTASFCYTLKEENINFNVLRELSSAGKVYLFEIYNKDFSKNKRGQGRDNLHTSYWKLLFSAENLKDVVLKLNGQAEIFYRPASLAETKAYTHKKGEVLKHKAYSKVWEALDSPIGTRLSWDDALKIPSITEKTNHNNQRVVQYNGQEIGRKAEFAIIKNRRYSVDKFLFHCPITLNFKANGQDNINARVNQFLANNKKINIIGIDRGEKHLLYISVINQQGEVLHQESFNTITNSYQTANGEKRQVVTDYHQKLDMSEDKRDKARKSWSTIENIKELKAGYLSHVVHRLAQLIIEFNAIVALEDLNHGFKRGRFKIEKQVYQKFEKALIDKLSYLAFKDRTSCLETGHYLNAFQLTSKFKGFNNLGKQSGILFYVNADYTSTTDPLTGYIKNVYKTYSSVKDSTEFWQRFNSIRYIASENRFEFSYDLADLKQKSLESKTKQTPLAKTQWTVSSHVTRSYYNQQTKQHELFEVTARIQQLLSKAEISYQHQNDLIPALASCQSKALHKELIWLFNSILTMRVTDSSKPSATSENDFILSPVAPYFDSRNLNKQLPENGDANGAYNIARKGIMLLERIGDFVPEGNKKYPDLLIRNNDWQNFVQRPEMVNKQKKKLVKLKTEYSNGSLFNDLAFKAAAKRPAATKKAGQAKKKKASGSGAGSPKKKRKVEDPKKKRKV

SEQ ID NO: 108 - DNA, 4581 bp, Artificial Sequence
  Description of Artificial Sequence: Synthetic polynucleotide
atggggcatcaccaccaccaccactcgtcgggtcttgttccacgtggttctggtaccatgtctgatcgcctggacgtgcttactaaccaatacccattatcgaaaactttgcgcttcgaattgaagccggttggagccacagctgactggattcgcaaacacaacgttatccgctatcataatggtaaactggttggaaaggatgcgatccgttttcaaaattataagtatctgaagaaaatgcttgatgagatgcatcgcttatttcttcagcaagcactggtgttggagccaaatagcaaccaggcgcaggagttgaccgcactgctgcgtgctattgagaataattattgcaacaacaacgacctgctggcgggcgattatcccagcctctctaccgataagaccattaaaatcagcaacggccttagcaagctgaccacggatctgttcgataagaagttcgaagactgggcataccaatacaaagaagatatgcccaatttctggcgtcaagatattgcggaattagagcaaaagcttcaggtgagtgcgaacgcaaaagatcaaaagttctacaaagggatcatcaagaagctgaagaataagatccagaagtctgaactgaaagcggaaacgcacaagggcttatactcacctacggagtcactgcaactgctggagtggctggtacgtcgtggcgatattaaactgacttacttagagattggtaaagagaacgagaaacttaatgaactggtcccgctggtcgaacttaaggacattcatcgcaatttcaataatttcgccacatatctttctggcttcagcaagaatcgtgagaatgtgtactcaaccaaatttgatcgtcgttcgggttataaagccaccagtgtaatcgcacgcacgttcgaacagaatttaatgttctgtcttggtaacattgccaagtggcacaaggtgacagaattcatcaaccaggcgaacaattacgagctcctgcaggagcacggcatcgattggaataagcaaattgccgcgctggaacacaaactggacgtgtgtctcgcagagttcttcgcgcttaataacttctcacaaacccttgcacaacagggtatcgaaaagtataaccaggtcttggccggcatcgccgagattgcaggccaacccaagacccagggcctgaacgaactcattaacctggcccgtcagaaattgtctgccaaacgctcacaactgcctacgttgcaactcctttacaaacaaatcttaagcaagggtgataagccattcatcgacgattttaaaagcgaccaagagttgatcgccgaattaaatgagtttgtaagcagccagattcacggagagcatggtgcaatcaaattaattaatcacgaacttgaaagctttatcaatgaagcccgtgcagcgcagcaacagatttatgtgcccaaggacaagcttaccgaattaagtcttctcttaacgggcagttggcaagctattaatcaatggcgttacaaactgttcgaccagaaacagctggataaacaacagaaacaatattcatttagcctggcccaggttgaacgctggctggcaactgaggttgagcaacaaaacttctaccaaaccgaaaaggagcgccagcagcataaagatacgcagccggcgaacgtcaccaccagcagcgatggacacagcattttaacagcatttgagcaacaggtgcagaccttattaaccaacatctgtgttgctgccgagaaatatcgccaattaagtgataatctcacagccatcgataaacaacgcgagagcgaatcaagtaagggattcgagcaaatcgcggtgattaaaaccttgctggacgcgtgtaacgagctgaatcactttctggcacgcttcacggtcaacaagaaggacaaactccccgaagatcgcgcagaattttggtatgaaaagttacaagcgtacattgacgcgtttccgatctacgagctgtataataaagtgcgtaattacttaagcaagaagccgtttagcactgagaaagtcaaaattaattttgacaattcccatttcctgtcgggttggacggcggactatgagcgtcacagcgccttattattcaaatttaatgaaaattacctgctgggtgtagtgaatgagaacttaagcagcgaggaagaagaaaagctgaagctcgtgggcggcgaagaacatgccaagcgcttcatttatgattttcagaaaatcgacaactcaaacccaccgcgcgttttcattcgtagcaaggggtcatcgttcgcacctgcggtcgaaaagtatcagttaccgattggcgatatcattgacatttacgatcagggtaaatttaagacagaacacaagaagaagaatgaggccgagtttaaagacagtctggtacgtttgatcgattattttaagctgggcttctctcgccatgacagctataagcactacccattcaagtggaaagccagtcatcaatatagcgacattgcggaattttacgctcataccgcctcattttgttacacgcttaaggaagaaaacatcaattttaacgttctgcgtgagttgtcgtcggcgggcaaagtatatctcttcgaaatttacaataaggatttctcaaagaacaagcgcggccaaggacgcgacaacttgcataccagttattggaagttgctgttctcggctgagaacctgaaggatgttgtgctgaaattaaacggccaagcggagatcttttaccgcccagcgtctttggccgaaaccaaggcctacacccataagaaaggggaagtactgaaacataaggcttatagcaaagtgtgggaagccctggattctcccattggcacccgcctgagctgggacgatgctttaaagatcccgtctattaccgagaagaccaatcacaataatcagcgtgttgtccagtacaacggccaagaaattggccgcaaagcggagttcgctattatcaagaaccgccgttattccgtcgataaattcctctttcactgcccgattacactcaacttcaaggcgaacggccaggacaacattaacgcacgcgttaatcaattcctggcaaataacaagaagatcaacattattggaattgaccgtggtgaaaagcatttactgtatatcagcgtgattaatcaacaaggcgaagtcctgcatcaggaaagcttcaatacaatcacgaattcatatcagaccgccaatggcgagaaacgccaagtagtcactgactatcaccagaagttggacatgagcgaggacaaacgcgataaagcacgtaagagctggagtacaatcgaaaatatcaaagagctgaaggcggggtatctgagccacgttgtacatcgcctcgcgcaactgattatcgaatttaatgccattgttgcgttggaagatcttaaccacgggttcaaacgcggacgttttaaaatcgaaaagcaagtgtatcagaagttcgaaaaggcgctgatcgacaaattgagctacttagcgtttaaggatcgcacgtcgtgtctggaaactggacattacttgaatgcctttcaattaacctcaaagttcaaaggctttaacaaccttggcaagcaatccgggattttgttctacgttaacgccgattacacgagcaccacggatcccttaacaggctatattaagaacgtatacaaaacctactcctcggtgaaggattcgaccgaattttggcagcgctttaactctatccgctatattgcgagcgagaaccgttttgaatttagctacgacttagcggacctgaaacagaagtcgctcgagagtaaaaccaaacagacccctctcgccaagacccaatggacggtctctagccacgttacccgttcctattacaaccagcagacgaagcaacatgagttattcgaagtgacagcgcgcattcagcaattgcttagcaaagcagaaatcagctatcaacatcaaaacgacttgatccctgcgttagcatcatgtcaaagtaaggcgttacacaaggagttgatttggctgttcaacagcatcctgactatgcgcgtcacggactcaagcaaaccgtccgcgacctcggagaatgattttatcctgagcccggtagcgccgtacttcgactcccgcaatctgaataagcagctgccggaaaacggcgacgcgaacggcgcatacaatatcgctcgtaaaggtatcatgcttctggaacgtatcggggacttcgtcccggaaggtaacaagaagtaccccgatttactgatccgcaataatgactggcagaattttgtacaacgcccggagatggtgaacaagcagaagaagaaactcgtgaagttgaaaacggaatactctaatggcagcctcttcaatgatttggcgtttaaggccgcagctaagcgccccgccgcgactaagaaagcgggtcaagcgaagaagaagaaagcgtcggggtcgggagcgggcagtccgaagaagaagcgtaaagtagaggatccgaagaagaaacgcaaagtataataa

SEQ ID NO: 109-200 - skipped (92 entries)

SEQ ID NO: 201 - DNA, 21 bp, Artificial Sequence
  Description of Artificial Sequence: Synthetic oligonucleotide
tgagatgacttctactgtttc

SEQ ID NO: 202 - DNA, 21 bp, Artificial Sequence
  Description of Artificial Sequence: Synthetic oligonucleotide
ccttttctacagaatgaaaca

SEQ ID NO: 203 - DNA, 21 bp, Artificial Sequence
  Description of Artificial Sequence: Synthetic oligonucleotide
cttttctacagaatgaaacag

SEQ ID NO: 204 - DNA, 21 bp, Artificial Sequence
  Description of Artificial Sequence: Synthetic oligonucleotide
ctacagaatgaaacagtagaa

SEQ ID NO: 205 - DNA, 21 bp, Artificial Sequence
  Description of Artificial Sequence: Synthetic oligonucleotide
tacagaatgaaacagtagaag

SEQ ID NO: 206 - DNA, 21 bp, Artificial Sequence
  Description of Artificial Sequence: Synthetic oligonucleotide
ccacaggagccgacctgccta

SEQ ID NO: 207 - DNA, 21 bp, Artificial Sequence
  Description of Artificial Sequence: Synthetic oligonucleotide
cacaggagccgacctgcctac

SEQ ID NO: 208 - DNA, 21 bp, Artificial Sequence
  Description of Artificial Sequence: Synthetic oligonucleotide
ttatttttctttttttaaagg

SEQ ID NO: 209 - DNA, 21 bp, Artificial Sequence
  Description of Artificial Sequence: Synthetic oligonucleotide
tatttttctttttttaaagga

SEQ ID NO: 210 - DNA, 21 bp, Artificial Sequence
  Description of Artificial Sequence: Synthetic oligonucleotide
atttttctttttttaaaggaa

SEQ ID NO: 211 - DNA, 21 bp, Artificial Sequence
  Description of Artificial Sequence: Synthetic oligonucleotide
tttttctttttttaaaggaaa

SEQ ID NO: 212 - DNA, 21 bp, Artificial Sequence
  Description of Artificial Sequence: Synthetic oligonucleotide
tctttttttaaaggaaacttc

SEQ ID NO: 213 - DNA, 21 bp, Artificial Sequence
  Description of Artificial Sequence: Synthetic oligonucleotide
ctttttttaaaggaaacttcc

SEQ ID NO: 214 - DNA, 21 bp, Artificial Sequence
  Description of Artificial Sequence: Synthetic oligonucleotide
tttttttaaaggaaacttcct

SEQ ID NO: 215 - DNA, 21 bp, Artificial Sequence
  Description of Artificial Sequence: Synthetic oligonucleotide
tttaaaggaaacttcctgtgc

SEQ ID NO: 216 - DNA, 21 bp, Artificial Sequence
  Description of Artificial Sequence: Synthetic oligonucleotide
ttaaaggaaacttcctgtgca

SEQ ID NO: 217 - DNA, 21 bp, Artificial Sequence
  Description of Artificial Sequence: Synthetic oligonucleotide
taaaggaaacttcctgtgcaa

SEQ ID NO: 218 - DNA, 21 bp, Artificial Sequence
  Description of Artificial Sequence: Synthetic oligonucleotide
aaaggtgataatctgggttgc

SEQ ID NO: 219 - DNA, 21 bp, Artificial Sequence
  Description of Artificial Sequence: Synthetic oligonucleotide
aaaggaaacttcctgtgcaac

SEQ ID NO: 220 - DNA, 21 bp, Artificial Sequence
  Description of Artificial Sequence: Synthetic oligonucleotide
aaggaaacttcctgtgcaacc

SEQ ID NO: 221 - DNA, 21 bp, Artificial Sequence
  Description of Artificial Sequence: Synthetic oligonucleotide
aaactttcaaaggtgataatc

SEQ ID NO: 222 - DNA, 21 bp, Artificial Sequence
  Description of Artificial Sequence: Synthetic oligonucleotide
aaagtttcaaagagaacctga

SEQ ID NO: 223 - DNA, 21 bp, Artificial Sequence
  Description of Artificial Sequence: Synthetic oligonucleotide
aaagagaacctgaaggacttt

SEQ ID NO: 224 - DNA, 21 bp, Artificial Sequence
  Description of Artificial Sequence: Synthetic oligonucleotide
tgcttgtcatcccctttgact

SEQ ID NO: 225 - DNA, 21 bp, Artificial Sequence
  Description of Artificial Sequence: Synthetic oligonucleotide
actgctgggagccagtccagg

SEQ ID NO: 226 - DNA, 21 bp, Artificial Sequence
  Description of Artificial Sequence: Synthetic oligonucleotide
cctaggtggtcaggcttgggg

SEQ ID NO: 227 - DNA, 21 bp, Artificial Sequence
  Description of Artificial Sequence: Synthetic oligonucleotide
tggtcaccattaatcatttcc

SEQ ID NO: 228 - DNA, 21 bp, Artificial Sequence
  Description of Artificial Sequence: Synthetic oligonucleotide
ctctgtgtatttaagagctct

SEQ ID NO: 229 - DNA, 21 bp, Artificial Sequence
  Description of Artificial Sequence: Synthetic oligonucleotide
agagctcttttgccagtgagc

SEQ ID NO: 230 - DNA, 21 bp, Artificial Sequence
  Description of Artificial Sequence: Synthetic oligonucleotide
attctgtagaaaaggaaaatg

SEQ ID NO: 231 - DNA, 21 bp, Artificial Sequence
  Description of Artificial Sequence: Synthetic oligonucleotide
acctccaggtaagatgcttct

SEQ ID NO: 232 - DNA, 21 bp, Artificial Sequence
  Description of Artificial Sequence: Synthetic oligonucleotide
cagaagcccctgccctggggt

SEQ ID NO: 233 - DNA, 21 bp, Artificial Sequence
  Description of Artificial Sequence: Synthetic oligonucleotide
gatggcaccacacagggttgt

SEQ ID NO: 234 - DNA, 21 bp, Artificial Sequence
  Description of Artificial Sequence: Synthetic oligonucleotide
tctccagtcagctggctgcag

SEQ ID NO: 235 - DNA, 21 bp, Artificial Sequence
  Description of Artificial Sequence: Synthetic oligonucleotide
tcagctgagcggccatgggca

SEQ ID NO: 236 - DNA, 21 bp, Artificial Sequence
  Description of Artificial Sequence: Synthetic oligonucleotide
ccacctgtcccctggtgactc

SEQ ID NO: 237 - DNA, 21 bp, Artificial Sequence
  Description of Artificial Sequence: Synthetic oligonucleotide
gggcgctcactgtgccccgag

SEQ ID NO: 238 - DNA, 21 bp, Artificial Sequence
  Description of Artificial Sequence: Synthetic oligonucleotide
aggaacaacccttgcccaccc

SEQ ID NO: 239 - DNA, 21 bp, Artificial Sequence
  Description of Artificial Sequence: Synthetic oligonucleotide
ctgctgcccccagcccccagg

SEQ ID NO: 240 - DNA, 21 bp, Artificial Sequence
  Description of Artificial Sequence: Synthetic oligonucleotide
tgtgccaacagttatgtaatg

SEQ ID NO: 241 - DNA, 21 bp, Artificial Sequence
  Description of Artificial Sequence: Synthetic oligonucleotide
atcccaaggagtcagagccac

SEQ ID NO: 242 - DNA, 21 bp, Artificial Sequence
  Description of Artificial Sequence: Synthetic oligonucleotide
ccctcacctctgacctcatta

SEQ ID NO: 243 - DNA, 21 bp, Artificial Sequence
  Description of Artificial Sequence: Synthetic oligonucleotide
cttgggtttgccctcacctct

SEQ ID NO: 244 - DNA, 21 bp, Artificial Sequence
  Description of Artificial Sequence: Synthetic oligonucleotide
ctctggccccacatggggtgc

SEQ ID NO: 245 - DNA, 21 bp, Artificial Sequence
  Description of Artificial Sequence: Synthetic oligonucleotide
ctcccttcccgcaggaaggag

SEQ ID NO: 246 - DNA, 21 bp, Artificial Sequence
  Description of Artificial Sequence: Synthetic oligonucleotide
tggccttgactccactccttc

SEQ ID NO: 247 - DNA, 21 bp, Artificial Sequence
  Description of Artificial Sequence: Synthetic oligonucleotide
gtcccagggcagagcagggca

SEQ ID NO: 248 - DNA, 21 bp, Artificial Sequence
  Description of Artificial Sequence: Synthetic oligonucleotide
actgcccagaaggccaacctc

SEQ ID NO: 249 - DNA, 21 bp, Artificial Sequence
  Description of Artificial Sequence: Synthetic oligonucleotide
tctactgcctcttagaactca

SEQ ID NO: 250 - DNA, 21 bp, Artificial Sequence
  Description of Artificial Sequence: Synthetic oligonucleotide
aaaggaaacttcctgtgcaat

SEQ ID NO: 251 - DNA, 21 bp, Artificial Sequence
  Description of Artificial Sequence: Synthetic oligonucleotide
aaggaaacttcctgtgcaatc

SEQ ID NO: 252 - DNA, 21 bp, Artificial Sequence
  Description of Artificial Sequence: Synthetic oligonucleotide
aaaggtgatagtctggattgc

SEQ ID NO: 253 - DNA, 21 bp, Artificial Sequence
  Description of Artificial Sequence: Synthetic oligonucleotide
aaactttcaaaggtgatagtc

SEQ ID NO: 254 - DNA, 21 bp, Artificial Sequence
  Description of Artificial Sequence: Synthetic oligonucleotide
gttgtatgtttcgatcatgct

SEQ ID NO: 255 - DNA, 21 bp, Artificial Sequence
  Description of Artificial Sequence: Synthetic oligonucleotide
aactttaacacagcatgatcg

SEQ ID NO: 256 - DNA, 21 bp, Artificial Sequence
  Description of Artificial Sequence: Synthetic oligonucleotide
acacagcatgatcgaaacata

SEQ ID NO: 257 - DNA, 21 bp, Artificial Sequence
  Description of Artificial Sequence: Synthetic oligonucleotide
atgctgatgggcagtccagtg

SEQ ID NO: 258 - DNA, 21 bp, Artificial Sequence
  Description of Artificial Sequence: Synthetic oligonucleotide
catgctgatgggcagtccagt

SEQ ID NO: 259 - DNA, 21 bp, Artificial Sequence
  Description of Artificial Sequence: Synthetic oligonucleotide
tatgtatttacttactgtttt

SEQ ID NO: 260 - DNA, 21 bp, Artificial Sequence
  Description of Artificial Sequence: Synthetic oligonucleotide
atgtatttacttactgttttt

SEQ ID NO: 261 - DNA, 21 bp, Artificial Sequence
  Description of Artificial Sequence: Synthetic oligonucleotide
tgtatttacttactgtttttc

SEQ ID NO: 262 - DNA, 21 bp, Artificial Sequence
  Description of Artificial Sequence: Synthetic oligonucleotide
cttactgtttttcttatcacc

SEQ ID NO: 263 - DNA, 21 bp, Artificial Sequence
  Description of Artificial Sequence: Synthetic oligonucleotide
tcttatcacccagatgattgg

SEQ ID NO: 264 - DNA, 21 bp, Artificial Sequence
  Description of Artificial Sequence: Synthetic oligonucleotide
cttatcacccagatgattggg

SEQ ID NO: 265 - DNA, 21 bp, Artificial Sequence
  Description of Artificial Sequence: Synthetic oligonucleotide
ttatcacccagatgattgggt

SEQ ID NO: 266 - DNA, 21 bp, Artificial Sequence
  Description of Artificial Sequence: Synthetic oligonucleotide
tgctgtgtatcttcatagaag

SEQ ID NO: 267 - DNA, 21 bp, Artificial Sequence
  Description of Artificial Sequence: Synthetic oligonucleotide
gctgtgtatcttcatagaagg

SEQ ID NO: 268 - DNA, 21 bp, Artificial Sequence
  Description of Artificial Sequence: Synthetic oligonucleotide
ctgtgtatcttcatagaaggt

SEQ ID NO: 269 - DNA, 21 bp, Artificial Sequence
  Description of Artificial Sequence: Synthetic oligonucleotide
atgaatacaaaatcttcatga

SEQ ID NO: 270 - DNA, 21 bp, Artificial Sequence
  Description of Artificial Sequence: Synthetic oligonucleotide
catgaatacaaaatcttcatg

SEQ ID NO: 271 - DNA, 21 bp, Artificial Sequence
  Description of Artificial Sequence: Synthetic oligonucleotide
tcctgtgttgcatctctgtat

SEQ ID NO: 272 - DNA, 21 bp, Artificial Sequence
  Description of Artificial Sequence: Synthetic oligonucleotide
gtattcatgaaaacgatacag

SEQ ID NO: 273 - DNA, 21 bp, Artificial Sequence
  Description of Artificial Sequence: Synthetic oligonucleotide
tattcatgaaaacgatacaga

SEQ ID NO: 274 - DNA, 21 bp, Artificial Sequence
  Description of Artificial Sequence: Synthetic oligonucleotide
atctcctcacagttcagtaag

SEQ ID NO: 275 - DNA, 21 bp, Artificial Sequence
  Description of Artificial Sequence: Synthetic oligonucleotide
aatctcctcacagttcagtaa

SEQ ID NO: 276 - DNA, 21 bp, Artificial Sequence
  Description of Artificial Sequence: Synthetic oligonucleotide
ccagtaattaagctgcttacc

SEQ ID NO: 277 - DNA, 21 bp, Artificial Sequence
  Description of Artificial Sequence: Synthetic oligonucleotide
accagtaattaagctgcttac

SEQ ID NO: 278 - DNA, 21 bp, Artificial Sequence
  Description of Artificial Sequence: Synthetic oligonucleotide
aaggctttgtgaaggtaagca

SEQ ID NO: 279 - DNA, 21 bp, Artificial Sequence
  Description of Artificial Sequence: Synthetic oligonucleotide
ttcgtctcctctttgtttaac

SEQ ID NO: 280 - DNA, 21 bp, Artificial Sequence
  Description of Artificial Sequence: Synthetic oligonucleotide
tttcttcgtctcctctttgtt

SEQ ID NO: 281 - DNA, 21 bp, Artificial Sequence
  Description of Artificial Sequence: Synthetic oligonucleotide
ctttcttcgtctcctctttgt

SEQ ID NO: 282 - DNA, 21 bp, Artificial Sequence
  Description of Artificial Sequence: Synthetic oligonucleotide
aggatataatgttaaacaaag

SEQ ID NO: 283 - DNA, 21 bp, Artificial Sequence
  Description of Artificial Sequence: Synthetic oligonucleotide
ggatataatgttaaacaaaga

SEQ ID NO: 284 - DNA, 21 bp, Artificial Sequence
  Description of Artificial Sequence: Synthetic oligonucleotide
aaagctgttttctttcttcgt

SEQ ID NO: 285 - DNA, 21 bp, Artificial Sequence
  Description of Artificial Sequence: Synthetic oligonucleotide
catttcaaagctgttttcttt

SEQ ID NO: 286 - DNA, 21 bp, Artificial Sequence
  Description of Artificial Sequence: Synthetic oligonucleotide
gcatttcaaagctgttttctt

SEQ ID NO: 287 - DNA, 21 bp, Artificial Sequence
  Description of Artificial Sequence: Synthetic oligonucleotide
tgcatttcaaagctgttttct

SEQ ID NO: 288 - DNA, 21 bp, Artificial Sequence
  Description of Artificial Sequence: Synthetic oligonucleotide
aggattctgatcacctgaaat

SEQ ID NO: 289 - DNA, 21 bp, Artificial Sequence
  Description of Artificial Sequence: Synthetic oligonucleotide
tggttccatttcaggtgatca

SEQ ID NO: 290 - DNA, 21 bp, Artificial Sequence
  Description of Artificial Sequence: Synthetic oligonucleotide
ggttccatttcaggtgatcag

SEQ ID NO: 291 - DNA, 21 bp, Artificial Sequence
  Description of Artificial Sequence: Synthetic oligonucleotide
gttccatttcaggtgatcaga

SEQ ID NO: 292 - DNA, 21 bp, Artificial Sequence
  Description of Artificial Sequence: Synthetic oligonucleotide
aggtgatcagaatcctcaaat

SEQ ID NO: 293 - DNA, 21 bp, Artificial Sequence
  Description of Artificial Sequence: Synthetic oligonucleotide
ctgctggcctcacttatgaca

SEQ ID NO: 294 - DNA, 21 bp, Artificial Sequence
  Description of Artificial Sequence: Synthetic oligonucleotide
agcccactgtaacactgttac

SEQ ID NO: 295 - DNA, 21 bp, Artificial Sequence
  Description of Artificial Sequence: Synthetic oligonucleotide
cagcccactgtaacactgtta

SEQ ID NO: 296 - DNA, 21 bp, Artificial Sequence
  Description of Artificial Sequence: Synthetic oligonucleotide
tcagcccactgtaacactgtt

SEQ ID NO: 297 - DNA, 21 bp, Artificial Sequence
  Description of Artificial Sequence: Synthetic oligonucleotide
cctttctttgtaacagtgtta

SEQ ID NO: 298 - DNA, 21 bp, Artificial Sequence
  Description of Artificial Sequence: Synthetic oligonucleotide
tttgtaacagtgttacagtgg

SEQ ID NO: 299 - DNA, 21 bp, Artificial Sequence
  Description of Artificial Sequence: Synthetic oligonucleotide
taacagtgttacagtgggctg

SEQ ID NO: 300 - DNA, 21 bp, Artificial Sequence
  Description of Artificial Sequence: Synthetic oligonucleotide
cagggttaccaagttgttgct

SEQ ID NO: 301 - DNA, 21 bp, Artificial Sequence
  Description of Artificial Sequence: Synthetic oligonucleotide
ccagggttaccaagttgttgc

SEQ ID NO: 302 - DNA, 21 bp, Artificial Sequence
  Description of Artificial Sequence: Synthetic oligonucleotide
ccattttccagggttaccaag

SEQ ID NO: 303 - DNA, 21 bp, Artificial Sequence
  Description of Artificial Sequence: Synthetic oligonucleotide
acggtcagctgtttcccattt

SEQ ID NO: 304 - DNA, 21 bp, Artificial Sequence
  Description of Artificial Sequence: Synthetic oligonucleotide
aacggtcagctgtttcccatt

SEQ ID NO: 305 - DNA, 21 bp, Artificial Sequence
  Description of Artificial Sequence: Synthetic oligonucleotide
ggcagaggctggctataaatg

SEQ ID NO: 306 - DNA, 21 bp, Artificial Sequence
  Description of Artificial Sequence: Synthetic oligonucleotide
tagccagcctctgcctaaagt

SEQ ID NO: 307 - DNA, 21 bp, Artificial Sequence
  Description of Artificial Sequence: Synthetic oligonucleotide
cagctctgagtaagattctct

SEQ ID NO: 308 - DNA, 21 bp, Artificial Sequence
  Description of Artificial Sequence: Synthetic oligonucleotide
gcggaactgtgggtatttgca

SEQ ID NO: 309 - DNA, 21 bp, Artificial Sequence
  Description of Artificial Sequence: Synthetic oligonucleotide
aattgcaaccaggtgcttcgg

SEQ ID NO: 310 - DNA, 21 bp, Artificial Sequence
  Description of Artificial Sequence: Synthetic oligonucleotide
tcaatgtgactgatccaagcc

SEQ ID NO: 311 - DNA, 21 bp, Artificial Sequence
  Description of Artificial Sequence: Synthetic oligonucleotide
agtaagccaaaggacgtgaag

SEQ ID NO: 312 - DNA, 21 bp, Artificial Sequence
  Description of Artificial Sequence: Synthetic oligonucleotide
gcttactcaaactctgaacag

SEQ ID NO: 313 - DNA, 21 bp, Artificial Sequence
  Description of Artificial Sequence: Synthetic oligonucleotide
actgctggcctcacttatgac

SEQ ID NO: 314 - DNA, 21 bp, Artificial Sequence
  Description of Artificial Sequence: Synthetic oligonucleotide
cagaggacctgaacaaggtgt

SEQ ID NO: 315 - DNA, 21 bp, Artificial Sequence
  Description of Artificial Sequence: Synthetic oligonucleotide
cctctccctgctttctttcag

SEQ ID NO: 316 - DNA, 21 bp, Artificial Sequence
  Description of Artificial Sequence: Synthetic oligonucleotide
ctctccctgctttctttcaga

SEQ ID NO: 317 - DNA, 21 bp, Artificial Sequence
  Description of Artificial Sequence: Synthetic oligonucleotide
tttcagactgtggctttacct

SEQ ID NO: 318 - DNA, 21 bp, Artificial Sequence
  Description of Artificial Sequence: Synthetic oligonucleotide
agactgtggctttacctcggg

SEQ ID NO: 319 - DNA, 21 bp, Artificial Sequence
  Description of Artificial Sequence: Synthetic oligonucleotide
tcttctgcaggtcaagagaaa

SEQ ID NO: 320 - DNA, 21 bp, Artificial Sequence
  Description of Artificial Sequence: Synthetic oligonucleotide
cagaggacctgaaaaacgtgt

SEQ ID NO: 321 - DNA, 21 bp, Artificial Sequence
  Description of Artificial Sequence: Synthetic oligonucleotide
tcttcccctgttttctttcag

SEQ ID NO: 322 - DNA, 21 bp, Artificial Sequence
  Description of Artificial Sequence: Synthetic oligonucleotide
cttcccctgttttctttcaga

SEQ ID NO: 323 - DNA, 21 bp, Artificial Sequence
  Description of Artificial Sequence: Synthetic oligonucleotide
ttcccctgttttctttcagac

SEQ ID NO: 324 - DNA, 21 bp, Artificial Sequence
  Description of Artificial Sequence: Synthetic oligonucleotide
ctttcagactgtggcttcacc

SEQ ID NO: 325 - DNA, 21 bp, Artificial Sequence
  Description of Artificial Sequence: Synthetic oligonucleotide
tttcagactgtggcttcacct

SEQ ID NO: 326 - DNA, 21 bp, Artificial Sequence
  Description of Artificial Sequence: Synthetic oligonucleotide
agactgtggcttcacctccgg

SEQ ID NO: 327 - DNA, 21 bp, Artificial Sequence
  Description of Artificial Sequence: Synthetic oligonucleotide
gagctagcctctggaatcctt

SEQ ID NO: 328 - DNA, 21 bp, Artificial Sequence
  Description of Artificial Sequence: Synthetic oligonucleotide
ggagctagcctctggaatcct

SEQ ID NO: 329 - DNA, 21 bp, Artificial Sequence
  Description of Artificial Sequence: Synthetic oligonucleotide
ggtgtgggagatctctgcttc

SEQ ID NO: 330 - DNA, 21 bp, Artificial Sequence
  Description of Artificial Sequence: Synthetic oligonucleotide
gggtgtgggagatctctgctt

SEQ ID NO: 331 - DNA, 21 bp, Artificial Sequence
  Description of Artificial Sequence: Synthetic oligonucleotide
agccatcagaagcagagatct

SEQ ID NO: 332 - DNA, 21 bp, Artificial Sequence
  Description of Artificial Sequence: Synthetic oligonucleotide
gccctatcctgggtccactcg

SEQ ID NO: 333 - DNA, 21 bp, Artificial Sequence
  Description of Artificial Sequence: Synthetic oligonucleotide
cactccatcctactcacctga

SEQ ID NO: 334 - DNA, 21 bp, Artificial Sequence
  Description of Artificial Sequence: Synthetic oligonucleotide
tttttcttatttattttctag

SEQ ID NO: 335 - DNA, 21 bp, Artificial Sequence
  Description of Artificial Sequence: Synthetic oligonucleotide
ttttcttatttattttctagt

SEQ ID NO: 336 - DNA, 21 bp, Artificial Sequence
  Description of Artificial Sequence: Synthetic oligonucleotide
tttcttatttattttctagtt

SEQ ID NO: 337 - DNA, 21 bp, Artificial Sequence
  Description of Artificial Sequence: Synthetic oligonucleotide
ttcttatttattttctagttg

SEQ ID NO: 338 - DNA, 21 bp, Artificial Sequence
  Description of Artificial Sequence: Synthetic oligonucleotide
tcttatttattttctagttgg

SEQ ID NO: 339 - DNA, 21 bp, Artificial Sequence
  Description of Artificial Sequence: Synthetic oligonucleotide
cttatttattttctagttggc

SEQ ID NO: 340 - DNA, 21 bp, Artificial Sequence
  Description of Artificial Sequence: Synthetic oligonucleotide
ttatttattttctagttggcg

SEQ ID NO: 341 - DNA, 21 bp, Artificial Sequence
  Description of Artificial Sequence: Synthetic oligonucleotide
ttttctagttggcgtttgggg

SEQ ID NO: 342 - DNA, 21 bp, Artificial Sequence
  Description of Artificial Sequence: Synthetic oligonucleotide
ctagttggcgtttgggggcaa

SEQ ID NO: 343 - DNA, 21 bp, Artificial Sequence
  Description of Artificial Sequence: Synthetic oligonucleotide
tagttggcgtttgggggcaag

SEQ ID NO: 344 - DNA, 21 bp, Artificial Sequence
  Description of Artificial Sequence: Synthetic oligonucleotide
cttttcaggtaatgaagaaat

SEQ ID NO: 345 - DNA, 21 bp, Artificial Sequence
  Description of Artificial Sequence: Synthetic oligonucleotide
caggtaatgaagaaatgggta

SEQ ID NO: 346 - DNA, 21 bp, Artificial Sequence
  Description of Artificial Sequence: Synthetic oligonucleotide
aggtaatgaagaaatgggtaa

SEQ ID NO: 347 - DNA, 21 bp, Artificial Sequence
  Description of Artificial Sequence: Synthetic oligonucleotide
cttttttcattttcaggtggt

SEQ ID NO: 348 - DNA, 21 bp, Artificial Sequence
  Description of Artificial Sequence: Synthetic oligonucleotide
ttcattttcaggtggtattac

SEQ ID NO: 349 - DNA, 21 bp, Artificial Sequence
  Description of Artificial Sequence: Synthetic oligonucleotide
tcattttcaggtggtattaca

SEQ ID NO: 350 - DNA, 21 bp, Artificial Sequence
  Description of Artificial Sequence: Synthetic oligonucleotide
cattttcaggtggtattacac

SEQ ID NO: 351 - DNA, 21 bp, Artificial Sequence
  Description of Artificial Sequence: Synthetic oligonucleotide
attttcaggtggtattacaca

SEQ ID NO: 352 - DNA, 21 bp, Artificial Sequence
  Description of Artificial Sequence: Synthetic oligonucleotide
caggtggtattacacagacac

SEQ ID NO: 353 - DNA, 21 bp, Artificial Sequence
  Description of Artificial Sequence: Synthetic oligonucleotide
aggtggtattacacagacacg

SEQ ID NO: 354 - DNA, 21 bp, Artificial Sequence
  Description of Artificial Sequence: Synthetic oligonucleotide
ccttctttctccccagcatat

SEQ ID NO: 355 - DNA, 21 bp, Artificial Sequence
  Description of Artificial Sequence: Synthetic oligonucleotide
tccccagcatataaagtctcc

SEQ ID NO: 356 - DNA, 21 bp, Artificial Sequence
  Description of Artificial Sequence: Synthetic oligonucleotide
agatccaggatactgagggca

SEQ ID NO: 357 - DNA, 21 bp, Artificial Sequence
  Description of Artificial Sequence: Synthetic oligonucleotide
tcattgtgttgccatagtatt

SEQ ID NO: 358 - DNA, 21 bp, Artificial Sequence
  Description of Artificial Sequence: Synthetic oligonucleotide
atcattgtgttgccatagtat

SEQ ID NO: 359 - DNA, 21 bp, Artificial Sequence
  Description of Artificial Sequence: Synthetic oligonucleotide
tatcattgtgttgccatagta

SEQ ID NO: 360 - DNA, 21 bp, Artificial Sequence
  Description of Artificial Sequence: Synthetic oligonucleotide
tcatcctcatcaccgcctatg

SEQ ID NO: 361 - DNA, 21 bp, Artificial Sequence
  Description of Artificial Sequence: Synthetic oligonucleotide
atcatcctcatcaccgcctat

SEQ ID NO: 362 - DNA, 21 bp, Artificial Sequence
  Description of Artificial Sequence: Synthetic oligonucleotide
tatcatcctcatcaccgccta

SEQ ID NO: 363 - DNA, 21 bp, Artificial Sequence
  Description of Artificial Sequence: Synthetic oligonucleotide
ctccaattctgaaaattcctt

SEQ ID NO: 364 - DNA, 21 bp, Artificial Sequence
  Description of Artificial Sequence: Synthetic oligonucleotide
cagaattggagcaaagtggtt

SEQ ID NO: 365 - DNA, 21 bp, Artificial Sequence
  Description of Artificial Sequence: Synthetic oligonucleotide
agaattggagcaaagtggtta

SEQ ID NO: 366 - DNA, 21 bp, Artificial Sequence
  Description of Artificial Sequence: Synthetic oligonucleotide
cttcctctggggtagcagaca

SEQ ID NO: 367 - DNA, 21 bp, Artificial Sequence
  Description of Artificial Sequence: Synthetic oligonucleotide
atctctacctgagggcaagag

SEQ ID NO: 368 - DNA, 21 bp, Artificial Sequence
  Description of Artificial Sequence: Synthetic oligonucleotide
tctctacctgagggcaagagg

SEQ ID NO: 369 - DNA, 21 bp, Artificial Sequence
  Description of Artificial Sequence: Synthetic oligonucleotide
tattcttgctccagtagtaaa

SEQ ID NO: 370 - DNA, 21 bp, Artificial Sequence
  Description of Artificial Sequence: Synthetic oligonucleotide
ctactggagcaagaatagaaa

SEQ ID NO: 371 - DNA, 21 bp, Artificial Sequence
  Description of Artificial Sequence: Synthetic oligonucleotide
cctgccgccagcacccgctcc

SEQ ID NO: 372 - DNA, 21 bp, Artificial Sequence
  Description of Artificial Sequence: Synthetic oligonucleotide
ccctccttcctccgcaggaca

SEQ ID NO: 373 - DNA, 21 bp, Artificial Sequence
  Description of Artificial Sequence: Synthetic oligonucleotide
tatcccacgttacctcatagt

SEQ ID NO: 374 - DNA, 21 bp, Artificial Sequence
  Description of Artificial Sequence: Synthetic oligonucleotide
acccccagcccatccggaaag

SEQ ID NO: 375 - DNA, 21 bp, Artificial Sequence
  Description of Artificial Sequence: Synthetic oligonucleotide
tccccggacaccgggctgaac

SEQ ID NO: 376 - DNA, 21 bp, Artificial Sequence
  Description of Artificial Sequence: Synthetic oligonucleotide
agtgtacttgacgcatcgcgc

SEQ ID NO: 377 - DNA, 21 bp, Artificial Sequence
  Description of Artificial Sequence: Synthetic oligonucleotide
ccgagaccgtcctggcgcgat

SEQ ID NO: 378 - DNA, 21 bp, Artificial Sequence
  Description of Artificial Sequence: Synthetic oligonucleotide
gcagtctacatgtctgagata

SEQ ID NO: 379 - DNA, 21 bp, Artificial Sequence
  Description of Artificial Sequence: Synthetic oligonucleotide
tgtgttttatctcagacatgt

SEQ ID NO: 380 - DNA, 21 bp, Artificial Sequence
  Description of Artificial Sequence: Synthetic oligonucleotide
tctcagacatgtagactgcca

SEQ ID NO: 381 - DNA, 21 bp, Artificial Sequence
  Description of Artificial Sequence: Synthetic oligonucleotide
aaataaatgcacccttgaaag

SEQ ID NO: 382 - DNA, 21 bp, Artificial Sequence
  Description of Artificial Sequence: Synthetic oligonucleotide
aagggtgcatttatttcaaaa

SEQ ID NO: 383 - DNA, 21 bp, Artificial Sequence
  Description of Artificial Sequence: Synthetic oligonucleotide
tttcaaaacatccttgcaaca

SEQ ID NO: 384 - DNA, 21 bp, Artificial Sequence
  Description of Artificial Sequence: Synthetic oligonucleotide
aaaacatccttgcaacattac

SEQ ID NO: 385 - DNA, 21 bp, Artificial Sequence
  Description of Artificial Sequence: Synthetic oligonucleotide
ttctgctccaaagaagaatct

SEQ ID NO: 386 - DNA, 21 bp, Artificial Sequence
  Description of Artificial Sequence: Synthetic oligonucleotide
ttcttccttagattcttcttt

SEQ ID NO: 387 - DNA, 21 bp, Artificial Sequence
  Description of Artificial Sequence: Synthetic oligonucleotide
gagcagaataaaagatctggc

SEQ ID NO: 388 - DNA, 21 bp, Artificial Sequence
  Description of Artificial Sequence: Synthetic oligonucleotide
tacaaactatgtcttttagaa

SEQ ID NO: 389 - DNA, 21 bp, Artificial Sequence
  Description of Artificial Sequence: Synthetic oligonucleotide
tccagtctgggcaagattgat

SEQ ID NO: 390 - DNA, 21 bp, Artificial Sequence
  Description of Artificial Sequence: Synthetic oligonucleotide
gaaataaactatcaatcttgc

SEQ ID NO: 391 - DNA, 21 bp, Artificial Sequence
  Description of Artificial Sequence: Synthetic oligonucleotide
cagaatactgaaacagggttg

SEQ ID NO: 392 - DNA, 21 bp, Artificial Sequence
  Description of Artificial Sequence: Synthetic oligonucleotide
agtattctggaaaacggtttc

SEQ ID NO: 393 - DNA, 21 bp, Artificial Sequence
  Description of Artificial Sequence: Synthetic oligonucleotide
actacttggtacttaccctgc

SEQ ID NO: 394 - DNA, 21 bp, Artificial Sequence
  Description of Artificial Sequence: Synthetic oligonucleotide
agtttgcagaagctgcctgtg

SEQ ID NO: 395 - DNA, 21 bp, Artificial Sequence
  Description of Artificial Sequence: Synthetic oligonucleotide
cagaagctgcctgtgatgtgg

SEQ ID NO: 396 - DNA, 21 bp, Artificial Sequence
  Description of Artificial Sequence: Synthetic oligonucleotide
ctgcgggatccattgagcatc

SEQ ID NO: 397 - DNA, 21 bp, Artificial Sequence
  Description of Artificial Sequence: Synthetic oligonucleotide
tcaaagattttactgcgggat

SEQ ID NO: 398 - DNA, 21 bp, Artificial Sequence
  Description of Artificial Sequence: Synthetic oligonucleotide
gggttctttgtttcttctatt

SEQ ID NO: 399 - DNA, 21 bp, Artificial Sequence
  Description of Artificial Sequence: Synthetic oligonucleotide
tttcttctattttagcacttt

SEQ ID NO: 400 - DNA, 21 bp, Artificial Sequence
  Description of Artificial Sequence: Synthetic oligonucleotide
ttctattttagcacttttggg

SEQ ID NO: 401 - DNA, 21 bp, Artificial Sequence
  Description of Artificial Sequence: Synthetic oligonucleotide
gcacttttgggagtgtggaag

SEQ ID NO: 402 - DNA, 21 bp, Artificial Sequence
  Description of Artificial Sequence: Synthetic oligonucleotide
ggagtgtggaagtccataatt

SEQ ID NO: 403 - DNA, 21 bp, Artificial Sequence
  Description of Artificial Sequence: Synthetic oligonucleotide
caaccagagaaggttcagaca

SEQ ID NO: 404 - DNA, 21 bp, Artificial Sequence
  Description of Artificial Sequence: Synthetic oligonucleotide
tggtgggatcctggcataagt

SEQ ID NO: 405 - DNA, 21 bp, Artificial Sequence
  Description of Artificial Sequence: Synthetic oligonucleotide
ttccccagagacttatgccag

SEQ ID NO: 406 - DNA, 21 bp, Artificial Sequence
  Description of Artificial Sequence: Synthetic oligonucleotide
cttataatcgattccagctct

SEQ ID NO: 407 - DNA, 21 bp, Artificial Sequence
  Description of Artificial Sequence: Synthetic oligonucleotide
cttttttgctttcttgtcata

SEQ ID NO: 408 - DNA, 21 bp, Artificial Sequence
  Description of Artificial Sequence: Synthetic oligonucleotide
ctttcttgtcatagacctgac

SEQ ID NO: 409 - DNA, 21 bp, Artificial Sequence
  Description of Artificial Sequence: Synthetic oligonucleotide
acacactgaagaaacttgtca

SEQ ID NO: 410 - DNA, 21 bp, Artificial Sequence
  Description of Artificial Sequence: Synthetic oligonucleotide
ttgtcatagacctgacaagtt

SEQ ID NO: 411 - DNA, 21 bp, Artificial Sequence
  Description of Artificial Sequence: Synthetic oligonucleotide
ttcagtgtgtgaaaaatcctg

SEQ ID NO: 412 - DNA, 21 bp, Artificial Sequence
  Description of Artificial Sequence: Synthetic oligonucleotide
acaactactatggggcagaca

SEQ ID NO: 413 - DNA, 21 bp, Artificial Sequence
  Description of Artificial Sequence: Synthetic oligonucleotide
cagtctgtgtactcacactca

SEQ ID NO: 414 - DNA, 21 bp, Artificial Sequence
  Description of Artificial Sequence: Synthetic oligonucleotide
ggagcagccgggagaagaggc

SEQ ID NO: 415 - DNA, 21 bp, Artificial Sequence
  Description of Artificial Sequence: Synthetic oligonucleotide
ggaccttcttctgcaagctca

SEQ ID NO: 416 - DNA, 21 bp, Artificial Sequence
  Description of Artificial Sequence: Synthetic oligonucleotide
tggtgcccttcaccatcatgc

SEQ ID NO: 417 - DNA, 21 bp, Artificial Sequence
  Description of Artificial Sequence: Synthetic oligonucleotide
ggcgatgaagaagtaacaggt

SEQ ID NO: 418 - DNA, 21 bp, Artificial Sequence
  Description of Artificial Sequence: Synthetic oligonucleotide
ccctgtgctggatgccctacc

SEQ ID NO: 419 - DNA, 21 bp, Artificial Sequence
  Description of Artificial Sequence: Synthetic oligonucleotide
acctcttcctcatgaacatct

SEQ ID NO: 420 - DNA, 21 bp, Artificial Sequence
  Description of Artificial Sequence: Synthetic oligonucleotide
gacccccgcttccgccaggcc

SEQ ID NO: 421 - DNA, 21 bp, Artificial Sequence
  Description of Artificial Sequence: Synthetic oligonucleotide
tcgtgcatctgttctccaccc

SEQ ID NO: 422 - DNA, 21 bp, Artificial Sequence
  Description of Artificial Sequence: Synthetic oligonucleotide
catggggatggggaatacaag

SEQ ID NO: 423 - DNA, 21 bp, Artificial Sequence
  Description of Artificial Sequence: Synthetic oligonucleotide
ggtcatcaccagtggtccttt

SEQ ID NO: 424 - DNA, 21 bp, Artificial Sequence
  Description of Artificial Sequence: Synthetic oligonucleotide
gcctggttccaaaggtcttgt

SEQ ID NO: 425 - DNA, 21 bp, Artificial Sequence
  Description of Artificial Sequence: Synthetic oligonucleotide
acttagctccagctgcagaaa

SEQ ID NO: 426 - DNA, 21 bp, Artificial Sequence
  Description of Artificial Sequence: Synthetic oligonucleotide
caaatgcctccatttcactta

SEQ ID NO: 427 - DNA, 21 bp, Artificial Sequence
  Description of Artificial Sequence: Synthetic oligonucleotide
tgcagctggagctaagtgaaa

SEQ ID NO: 428 - DNA, 21 bp, Artificial Sequence
  Description of Artificial Sequence: Synthetic oligonucleotide
taaaccaacacaagtccaact

SEQ ID NO: 429 - DNA, 21 bp, Artificial Sequence
  Description of Artificial Sequence: Synthetic oligonucleotide
cactgtccacttccctaggtg

SEQ ID NO: 430 - DNA, 21 bp, Artificial Sequence
  Description of Artificial Sequence: Synthetic oligonucleotide
cgtggatcagacactgcgaga

SEQ ID NO: 431 - DNA, 21 bp, Artificial Sequence
  Description of Artificial Sequence: Synthetic oligonucleotide
tccacccaccctctccatagg

SEQ ID NO: 432 - DNA, 21 bp, Artificial Sequence
  Description of Artificial Sequence: Synthetic oligonucleotide
gattcgatccagcgggaagtc

SEQ ID NO: 433 - DNA, 21 bp, Artificial Sequence
  Description of Artificial Sequence: Synthetic oligonucleotide
cagacaagccaggatgcacgc

SEQ ID NO: 434 - DNA, 21 bp, Artificial Sequence
  Description of Artificial Sequence: Synthetic oligonucleotide
accgtgaactgcaccaccagc

SEQ ID NO: 435 - DNA, 21 bp, Artificial Sequence
  Description of Artificial Sequence: Synthetic oligonucleotide
ctaatagtttggaccagacag

SEQ ID NO: 436 - DNA, 21 bp, Artificial Sequence
  Description of Artificial Sequence: Synthetic oligonucleotide
gaccagacagacatgcacgga

SEQ ID NO: 437 - DNA, 21 bp, Artificial Sequence
  Description of Artificial Sequence: Synthetic oligonucleotide
ccaccacccccaggcacacct

SEQ ID NO: 438 - DNA, 21 bp, Artificial Sequence
  Description of Artificial Sequence: Synthetic oligonucleotide
cacacctgtacacactgattg

SEQ ID NO: 439 - DNA, 21 bp, Artificial Sequence
  Description of Artificial Sequence: Synthetic oligonucleotide
aagcatcaggatcctttatct

SEQ ID NO: 440 - DNA, 21 bp, Artificial Sequence
  Description of Artificial Sequence: Synthetic oligonucleotide
tgggtggatccaagtgccctt

SEQ ID NO: 441 - DNA, 21 bp, Artificial Sequence
  Description of Artificial Sequence: Synthetic oligonucleotide
ctccaagtctcacctgccaga

SEQ ID NO: 442 - DNA, 21 bp, Artificial Sequence
  Description of Artificial Sequence: Synthetic oligonucleotide
tgagggaaaggacaagatgaa

SEQ ID NO: 443 - DNA, 21 bp, Artificial Sequence
  Description of Artificial Sequence: Synthetic oligonucleotide
accgcggccatcctgcaggca

SEQ ID NO: 444 - DNA, 21 bp, Artificial Sequence
  Description of Artificial Sequence: Synthetic oligonucleotide
ggatccagcaggccaaagctc

SEQ ID NO: 445 - DNA, 21 bp, Artificial Sequence
  Description of Artificial Sequence: Synthetic oligonucleotide
gcctgctggatcccaaactct

SEQ ID NO: 446 - DNA, 21 bp, Artificial Sequence
  Description of Artificial Sequence: Synthetic oligonucleotide
tgtgttgcagttcagcaggag

SEQ ID NO: 447 - DNA, 21 bp, Artificial Sequence
  Description of Artificial Sequence: Synthetic oligonucleotide
ctagcagagaaggaagaaccc

SEQ ID NO: 448 - DNA, 21 bp, Artificial Sequence
  Description of Artificial Sequence: Synthetic oligonucleotide
atcccaatctcactgtaggcc

SEQ ID NO: 449 - DNA, 21 bp, Artificial Sequence
  Description of Artificial Sequence: Synthetic oligonucleotide
actcccaaacaaccagcgccg

SEQ ID NO: 450 - DNA, 21 bp, Artificial Sequence
  Description of Artificial Sequence: Synthetic oligonucleotide
ctttcacgccagggtctcagt

SEQ ID NO: 451 - DNA, 21 bp, Artificial Sequence
  Description of Artificial Sequence: Synthetic oligonucleotide
acgccagggtctcagtacagc

SEQ ID NO: 452 - DNA, 21 bp, Artificial Sequence
  Description of Artificial Sequence: Synthetic oligonucleotide
ccggaggacagagactgacat

SEQ ID NO: 453 - DNA, 21 bp, Artificial Sequence
  Description of Artificial Sequence: Synthetic oligonucleotide
gcttctgcatcacaagtcaga

SEQ ID NO: 454 - DNA, 21 bp, Artificial Sequence
  Description of Artificial Sequence: Synthetic oligonucleotide
tcttcagttaggaagccgatc

SEQ ID NO: 455 - DNA, 21 bp, Artificial Sequence
  Description of Artificial Sequence: Synthetic oligonucleotide
aagatgggaagatgatcggct

SEQ ID NO: 456 - DNA, 21 bp, Artificial Sequence
  Description of Artificial Sequence: Synthetic oligonucleotide
cactgatacatccctcgaggg

SEQ ID NO: 457 - DNA, 21 bp, Artificial Sequence
  Description of Artificial Sequence: Synthetic oligonucleotide
gttcaatgcagttctgacaca

SEQ ID NO: 458 - DNA, 21 bp, Artificial Sequence
  Description of Artificial Sequence: Synthetic oligonucleotide
cctacagtgtgtcagaactgc

SEQ ID NO: 459 - DNA, 21 bp, Artificial Sequence
  Description of Artificial Sequence: Synthetic oligonucleotide
cctctcgactggcgaactcca

SEQ ID NO: 460 - DNA, 21 bp, Artificial Sequence
  Description of Artificial Sequence: Synthetic oligonucleotide
cttgaaggtggctgtactggt

SEQ ID NO: 461 - DNA, 21 bp, Artificial Sequence
  Description of Artificial Sequence: Synthetic oligonucleotide
caggtactttggcccagtcaa

SEQ ID NO: 462 - DNA, 21 bp, Artificial Sequence
  Description of Artificial Sequence: Synthetic oligonucleotide
ctcttcctcctactcaccatc

SEQ ID NO: 463 - DNA, 21 bp, Artificial Sequence
  Description of Artificial Sequence: Synthetic oligonucleotide
tcctgagagtccagtttgtat

SEQ ID NO: 464 - DNA, 21 bp, Artificial Sequence
  Description of Artificial Sequence: Synthetic oligonucleotide
gctggtgtcgttttgtcctga

SEQ ID NO: 465 - DNA, 21 bp, Artificial Sequence
  Description of Artificial Sequence: Synthetic oligonucleotide
ttcgtggccaatgccataatc

SEQ ID NO: 466 - DNA, 21 bp, Artificial Sequence
  Description of Artificial Sequence: Synthetic oligonucleotide
ccaacaaatatatggtgttgt

SEQ ID NO: 467 - DNA, 21 bp, Artificial Sequence
  Description of Artificial Sequence: Synthetic oligonucleotide
aaggcacattgcttggtacat

SEQ ID NO: 468 - DNA, 21 bp, Artificial Sequence
  Description of Artificial Sequence: Synthetic oligonucleotide
aaagaggtcctatggaaaaaa

SEQ ID NO: 469 - DNA, 21 bp, Artificial Sequence
  Description of Artificial Sequence: Synthetic oligonucleotide
aaagatgagaaagctctgaat

SEQ ID NO: 470 - DNA, 21 bp, Artificial Sequence
  Description of Artificial Sequence: Synthetic oligonucleotide
gcgattccatttcatactcat

SEQ ID NO: 471 - DNA, 21 bp, Artificial Sequence
  Description of Artificial Sequence: Synthetic oligonucleotide
cagagtctcttccatctccca

SEQ ID NO: 472 - DNA, 21 bp, Artificial Sequence
  Description of Artificial Sequence: Synthetic oligonucleotide
cattgctccataggacaatcc

SEQ ID NO: 473 - DNA, 21 bp, Artificial Sequence
  Description of Artificial Sequence: Synthetic oligonucleotide
agatggaaaatgatcttccac

SEQ ID NO: 474 - DNA, 21 bp, Artificial Sequence
  Description of Artificial Sequence: Synthetic oligonucleotide
taggtcattcaagacacagat

SEQ ID NO: 475 - DNA, 21 bp, Artificial Sequence
  Description of Artificial Sequence: Synthetic oligonucleotide
ggtattctgaaatgtgacaga

SEQ ID NO: 476 - DNA, 21 bp, Artificial Sequence
  Description of Artificial Sequence: Synthetic oligonucleotide
tagttgtcactgaaacagtaa

SEQ ID NO: 477 - DNA, 21 bp, Artificial Sequence
  Description of Artificial Sequence: Synthetic oligonucleotide
gcatagccattgctggtcccg

SEQ ID NO: 478 - DNA, 21 bp, Artificial Sequence
  Description of Artificial Sequence: Synthetic oligonucleotide
actccgtcctctggttgaaga

SEQ ID NO: 479 - DNA, 21 bp, Artificial Sequence
  Description of Artificial Sequence: Synthetic oligonucleotide
cagtgtcaggcacctacgatg

SEQ ID NO: 480 - DNA, 21 bp, Artificial Sequence
  Description of Artificial Sequence: Synthetic oligonucleotide
ctgttccatcattagcttctt

SEQ ID NO: 481 - DNA, 21 bp, Artificial Sequence
  Description of Artificial Sequence: Synthetic oligonucleotide
aggtgacatgggaagtccagg

SEQ ID NO: 482 - DNA, 21 bp, Artificial Sequence
  Description of Artificial Sequence: Synthetic oligonucleotide
caagaagcagcaaactgacct

SEQ ID NO: 483 - DNA, 21 bp, Artificial Sequence
  Description of Artificial Sequence: Synthetic oligonucleotide
ggtgacaaaggaccaatggga

SEQ ID NO: 484 - DNA, 21 bp, Artificial Sequence
  Description of Artificial Sequence: Synthetic oligonucleotide
agaggggtcatcgatgctcac

SEQ ID NO: 485 - DNA, 21 bp, Artificial Sequence
  Description of Artificial Sequence: Synthetic oligonucleotide
atgccggctctactgtacctt

SEQ ID NO: 486 - DNA, 21 bp, Artificial Sequence
  Description of Artificial Sequence: Synthetic oligonucleotide
cctgccagcactggatcccaa

SEQ ID NO: 487 - DNA, 21 bp, Artificial Sequence
  Description of Artificial Sequence: Synthetic oligonucleotide
ctttgggatccagtgctggca

SEQ ID NO: 488 - DNA, 21 bp, Artificial Sequence
  Description of Artificial Sequence: Synthetic oligonucleotide
cttccaggtataaattcatta

SEQ ID NO: 489 - DNA, 21 bp, Artificial Sequence
  Description of Artificial Sequence: Synthetic oligonucleotide
ttgtgcatttctgatgataat

SEQ ID NO: 490 - DNA, 21 bp, Artificial Sequence
  Description of Artificial Sequence: Synthetic oligonucleotide
tagcatttcttgtgcatttct

SEQ ID NO: 491 - DNA, 21 bp, Artificial Sequence
  Description of Artificial Sequence: Synthetic oligonucleotide
actctcatagcattcaagtct

SEQ ID NO: 492 - DNA, 21 bp, Artificial Sequence
  Description of Artificial Sequence: Synthetic oligonucleotide
acacagcactccagctgaaac

SEQ ID NO: 493 - DNA, 21 bp, Artificial Sequence
  Description of Artificial Sequence: Synthetic oligonucleotide
ctttgacacagcactccagct

SEQ ID NO: 494 - DNA, 21 bp, Artificial Sequence
  Description of Artificial Sequence: Synthetic oligonucleotide
agctggagtgctgtgtcaaag

SEQ ID NO: 495 - DNA, 21 bp, Artificial Sequence
  Description of Artificial Sequence: Synthetic oligonucleotide
ttatgtcagggtgcaggattt

SEQ ID NO: 496 - DNA, 21 bp, Artificial Sequence
  Description of Artificial Sequence: Synthetic oligonucleotide
catggatcaagagatcataat

SEQ ID NO: 497 - DNA, 21 bp, Artificial Sequence
  Description of Artificial Sequence: Synthetic oligonucleotide
caaaagcacctacagaaccaa

SEQ ID NO: 498 - DNA, 21 bp, Artificial Sequence
  Description of Artificial Sequence: Synthetic oligonucleotide
agtctgtcagcaagataacca

SEQ ID NO: 499 - DNA, 21 bp, Artificial Sequence
  Description of Artificial Sequence: Synthetic oligonucleotide
ggtaggggatacggtatgctg

SEQ ID NO: 500 - DNA, 21 bp, Artificial Sequence
  Description of Artificial Sequence: Synthetic oligonucleotide
agcataccgtatcccctaccc

SEQ ID NO: 501 - DNA, 21 bp, Artificial Sequence
  Description of Artificial Sequence: Synthetic oligonucleotide
catagcaccagactgaaagtc

SEQ ID NO: 502 - DNA, 21 bp, Artificial Sequence
  Description of Artificial Sequence: Synthetic oligonucleotide
ccttatcataagaaacatcat

SEQ ID NO: 503 - DNA, 21 bp, Artificial Sequence
  Description of Artificial Sequence: Synthetic oligonucleotide
aatgcgtcagcactaagatac

SEQ ID NO: 504 - DNA, 21 bp, Artificial Sequence
  Description of Artificial Sequence: Synthetic oligonucleotide
ccctaataaccatcacagtga

SEQ ID NO: 505 - DNA, 21 bp, Artificial Sequence
  Description of Artificial Sequence: Synthetic oligonucleotide
ctctaggagcattacccagtg

SEQ ID NO: 506 - DNA, 21 bp, Artificial Sequence
  Description of Artificial Sequence: Synthetic oligonucleotide
tgtgtgaattaaccattgcag

SEQ ID NO: 507 - DNA, 21 bp, Artificial Sequence
  Description of Artificial Sequence: Synthetic oligonucleotide
atgtatcttgaatcttcctct

SEQ ID NO: 508 - DNA, 21 bp, Artificial Sequence
  Description of Artificial Sequence: Synthetic oligonucleotide
agttaccctgctcatgaacaa

SEQ ID NO: 509 - DNA, 21 bp, Artificial Sequence
  Description of Artificial Sequence: Synthetic oligonucleotide
gagagtggatagtagatatca

SEQ ID NO: 510 - DNA, 21 bp, Artificial Sequence
  Description of Artificial Sequence: Synthetic oligonucleotide
atatctactatccactctcca

SEQ ID NO: 511 - DNA, 21 bp, Artificial Sequence
  Description of Artificial Sequence: Synthetic oligonucleotide
atgtggactcaaatggttact

SEQ ID NO: 512 - DNA, 21 bp, Artificial Sequence
  Description of Artificial Sequence: Synthetic oligonucleotide
cctgtcaatcactggcttaaa

SEQ ID NO: 513 - DNA, 21 bp, Artificial Sequence
  Description of Artificial Sequence: Synthetic oligonucleotide
gagcaatatgaactgtcaatg

SEQ ID NO: 514 - DNA, 21 bp, Artificial Sequence
  Description of Artificial Sequence: Synthetic oligonucleotide
acttgggctcatatgacataa

SEQ ID NO: 515 - DNA, 21 bp, Artificial Sequence
  Description of Artificial Sequence: Synthetic oligonucleotide
tccttaccatgttacttgtca

SEQ ID NO: 516 - DNA, 21 bp, Artificial Sequence
  Description of Artificial Sequence: Synthetic oligonucleotide
ttacagtgcctacaccaacta

SEQ ID NO: 517 - DNA, 21 bp, Artificial Sequence
  Description of Artificial Sequence: Synthetic oligonucleotide
ccgtagaggtaaagaactatg

SEQ ID NO: 518 - DNA, 21 bp, Artificial Sequence
  Description of Artificial Sequence: Synthetic oligonucleotide
gtgttaagaattcagaatgga

SEQ ID NO: 519 - DNA, 21 bp, Artificial Sequence
  Description of Artificial Sequence: Synthetic oligonucleotide
atggatcaccaacatgatcag

SEQ ID NO: 520 - DNA, 21 bp, Artificial Sequence
  Description of Artificial Sequence: Synthetic oligonucleotide
actctgacccaaagagaattt

SEQ ID NO: 521 - DNA, 21 bp, Artificial Sequence
  Description of Artificial Sequence: Synthetic oligonucleotide
gggatcataatcgacttcctg

SEQ ID NO: 522 - DNA, 21 bp, Artificial Sequence
  Description of Artificial Sequence: Synthetic oligonucleotide
agttgtaacaccccacacatg

SEQ ID NO: 523 - DNA, 21 bp, Artificial Sequence
  Description of Artificial Sequence: Synthetic oligonucleotide
gagacaaaacctgaatcaaaa

SEQ ID NO: 524 - DNA, 21 bp, Artificial Sequence
  Description of Artificial Sequence: Synthetic oligonucleotide
agtagtaaccagtctgaacct

SEQ ID NO: 525 - DNA, 21 bp, Artificial Sequence
  Description of Artificial Sequence: Synthetic oligonucleotide
tggagtgatcactctcagaac

SEQ ID NO: 526 - DNA, 21 bp, Artificial Sequence
  Description of Artificial Sequence: Synthetic oligonucleotide
tctgtccccctcaagaccctc

SEQ ID NO: 527 - DNA, 21 bp, Artificial Sequence
  Description of Artificial Sequence: Synthetic oligonucleotide
aactgcacttggtagacaaca

SEQ ID NO: 528 - DNA, 21 bp, Artificial Sequence
  Description of Artificial Sequence: Synthetic oligonucleotide
cttcccagcaccgacagtaaa

SEQ ID NO: 529 - DNA, 21 bp, Artificial Sequence
  Description of Artificial Sequence: Synthetic oligonucleotide
aatgtcactctacgccttcga

SEQ ID NO: 530 - DNA, 21 bp, Artificial Sequence
  Description of Artificial Sequence: Synthetic oligonucleotide
ccagtaatggacataataaca

SEQ ID NO: 531 - DNA, 21 bp, Artificial Sequence
  Description of Artificial Sequence: Synthetic oligonucleotide
agttatccaatgaaatggagt

SEQ ID NO: 532 - DNA, 21 bp, Artificial Sequence
  Description of Artificial Sequence: Synthetic oligonucleotide
attggataacttaaaaccctc

SEQ ID NO: 533 - DNA, 21 bp, Artificial Sequence
  Description of Artificial Sequence: Synthetic oligonucleotide
gtagcaagatatgttgcttaa

SEQ ID NO: 534 - DNA, 21 bp, Artificial Sequence
  Description of Artificial Sequence: Synthetic oligonucleotide
gcctccactgagcttcagcaa

SEQ ID NO: 535 - DNA, 21 bp, Artificial Sequence
  Description of Artificial Sequence: Synthetic oligonucleotide
acactccaccaagcatcccat

SEQ ID NO: 536 - DNA, 21 bp, Artificial Sequence
  Description of Artificial Sequence: Synthetic oligonucleotide
cttccacaacagtatctaaat

SEQ ID NO: 537 - DNA, 21 bp, Artificial Sequence
  Description of Artificial Sequence: Synthetic oligonucleotide
gctacaagcgatatattccag

SEQ ID NO: 538 - DNA, 21 bp, Artificial Sequence
  Description of Artificial Sequence: Synthetic oligonucleotide
attcgaatgacggtggaaacg

SEQ ID NO: 539 - DNA, 21 bp, Artificial Sequence
  Description of Artificial Sequence: Synthetic oligonucleotide
gcatgaagctgatgttatccg

SEQ ID NO: 540 - DNA, 21 bp, Artificial Sequence
  Description of Artificial Sequence: Synthetic oligonucleotide
gtacacacatttccatggacc

SEQ ID NO: 541 - DNA, 21 bp, Artificial Sequence
  Description of Artificial Sequence: Synthetic oligonucleotide
ccagagcgtggttccaaagct

SEQ ID NO: 542 - DNA, 21 bp, Artificial Sequence
  Description of Artificial Sequence: Synthetic oligonucleotide
agatcagctatgtggttacct

SEQ ID NO: 543 - DNA, 21 bp, Artificial Sequence
  Description of Artificial Sequence: Synthetic oligonucleotide
ccttacaaatctgaacggcat

SEQ ID NO: 544 - DNA, 21 bp, Artificial Sequence
  Description of Artificial Sequence: Synthetic oligonucleotide
accaaagcaattgaaaccgat

SEQ ID NO: 545 - DNA, 21 bp, Artificial Sequence
  Description of Artificial Sequence: Synthetic oligonucleotide
gattgcattaaacattctgga

SEQ ID NO: 546 - DNA, 21 bp, Artificial Sequence
  Description of Artificial Sequence: Synthetic oligonucleotide
gaagcagcaatacagatttct

SEQ ID NO: 547 - DNA, 21 bp, Artificial Sequence
  Description of Artificial Sequence: Synthetic oligonucleotide
aaggcgtacgaagagaagtag

SEQ ID NO: 548 - DNA, 21 bp, Artificial Sequence
  Description of Artificial Sequence: Synthetic oligonucleotide
agatatgtatctagtgatcca

SEQ ID NO: 549 - DNA, 21 bp, Artificial Sequence
  Description of Artificial Sequence: Synthetic oligonucleotide
gatcactagatacatatctga

SEQ ID NO: 550 - DNA, 21 bp, Artificial Sequence
  Description of Artificial Sequence: Synthetic oligonucleotide
gcacatacattcccatgaata

SEQ ID NO: 551 - DNA, 21 bp, Artificial Sequence
  Description of Artificial Sequence: Synthetic oligonucleotide
aatgcattcaggtggtaccca

SEQ ID NO: 552 - DNA, 21 bp, Artificial Sequence
  Description of Artificial Sequence: Synthetic oligonucleotide
ccacaaagtggtaccaaaact

SEQ ID NO: 553 - DNA, 21 bp, Artificial Sequence
  Description of Artificial Sequence: Synthetic oligonucleotide
aagatagtctcgtaaacttcc

SEQ ID NO: 554 - DNA, 21 bp, Artificial Sequence
  Description of Artificial Sequence: Synthetic oligonucleotide
ggttaaccaaagtcttgccac

SEQ ID NO: 555 - DNA, 21 bp, Artificial Sequence
  Description of Artificial Sequence: Synthetic oligonucleotide
caggtatgctccagaatcact

SEQ ID NO: 556 - DNA, 21 bp, Artificial Sequence
  Description of Artificial Sequence: Synthetic oligonucleotide
ggttatcatggtaccgatgct

SEQ ID NO: 557 - DNA, 21 bp, Artificial Sequence
  Description of Artificial Sequence: Synthetic oligonucleotide
agatatacagcatcggtacca

SEQ ID NO: 558 - DNA, 21 bp, Artificial Sequence
  Description of Artificial Sequence: Synthetic oligonucleotide
tcaatgtgatggcaccaccat

SEQ ID NO: 559 - DNA, 21 bp, Artificial Sequence
  Description of Artificial Sequence: Synthetic oligonucleotide
aacttactcttcagccgtggt

SEQ ID NO: 560 - DNA, 21 bp, Artificial Sequence
  Description of Artificial Sequence: Synthetic oligonucleotide
tctatctcttgggccagggcc

SEQ ID NO: 561 - DNA, 21 bp, Artificial Sequence
  Description of Artificial Sequence: Synthetic oligonucleotide
gtcttctacaataccaacagc

SEQ ID NO: 562 - DNA, 21 bp, Artificial Sequence
  Description of Artificial Sequence: Synthetic oligonucleotide
ccaaccatcaaggctctgtat

SEQ ID NO: 563 - DNA, 21 bp, Artificial Sequence
  Description of Artificial Sequence: Synthetic oligonucleotide
catttcaggataaaagtcttc

SEQ ID NO: 564 - DNA, 21 bp, Artificial Sequence
  Description of Artificial Sequence: Synthetic oligonucleotide
aggataaaagtcttcatgttg

SEQ ID NO: 565 - DNA, 21 bp, Artificial Sequence
  Description of Artificial Sequence: Synthetic oligonucleotide
ctgtcccgatgatcaaaccct

SEQ ID NO: 566 - DNA, 21 bp, Artificial Sequence
  Description of Artificial Sequence: Synthetic oligonucleotide
tcttgaagagacactttgctg

SEQ ID NO: 567 - DNA, 21 bp, Artificial Sequence
  Description of Artificial Sequence: Synthetic oligonucleotide
atcatcgggacagcaaagtgt

SEQ ID NO: 568 - DNA, 21 bp, Artificial Sequence
  Description of Artificial Sequence: Synthetic oligonucleotide
tcataagcaggtggagcattg

SEQ ID NO: 569 - DNA, 21 bp, Artificial Sequence
  Description of Artificial Sequence: Synthetic oligonucleotide
tgcccacactagacatggcgc

SEQ ID NO: 570 - DNA, 21 bp, Artificial Sequence
  Description of Artificial Sequence: Synthetic oligonucleotide
ggacttgggggtcgtgcagat

SEQ ID NO: 571 - DNA, 21 bp, Artificial Sequence
  Description of Artificial Sequence: Synthetic oligonucleotide
gattcctggctcttctgggac

SEQ ID NO: 572 - DNA, 21 bp, Artificial Sequence
  Description of Artificial Sequence: Synthetic oligonucleotide
ctctgatcttaacagttccgc

SEQ ID NO: 573 - DNA, 21 bp, Artificial Sequence
  Description of Artificial Sequence: Synthetic oligonucleotide
gaagctcatagattcgacatt

SEQ ID NO: 574 - DNA, 21 bp, Artificial Sequence
  Description of Artificial Sequence: Synthetic oligonucleotide
gaggcagctgctacagagatg

SEQ ID NO: 575 - DNA, 21 bp, Artificial Sequence
  Description of Artificial Sequence: Synthetic oligonucleotide
tactgatacaccatgttggca

SEQ ID NO: 576 - DNA, 21 bp, Artificial Sequence
  Description of Artificial Sequence: Synthetic oligonucleotide
caggcctctactacgtggaca

SEQ ID NO: 577 - DNA, 21 bp, Artificial Sequence
  Description of Artificial Sequence: Synthetic oligonucleotide
aggggccaccttctctgtagg

SEQ ID NO: 578 - DNA, 21 bp, Artificial Sequence
  Description of Artificial Sequence: Synthetic oligonucleotide
agggggtagagccactatact

SEQ ID NO: 579 - DNA, 21 bp, Artificial Sequence
  Description of Artificial Sequence: Synthetic oligonucleotide
tctatgcgatctccagagctc

SEQ ID NO: 580 - DNA, 21 bp, Artificial Sequence
  Description of Artificial Sequence: Synthetic oligonucleotide
tcttatcagcccacagaattc

SEQ ID NO: 581 - DNA, 21 bp, Artificial Sequence
  Description of Artificial Sequence: Synthetic oligonucleotide
tccgtccccacccagggactg

SEQ ID NO: 582 - DNA, 21 bp, Artificial Sequence
  Description of Artificial Sequence: Synthetic oligonucleotide
agtgtcggcagcctccaagct

SEQ ID NO: 583 - DNA, 21 bp, Artificial Sequence
  Description of Artificial Sequence: Synthetic oligonucleotide
atcttatagggtcctggactc

SEQ ID NO: 584 - DNA, 21 bp, Artificial Sequence
  Description of Artificial Sequence: Synthetic oligonucleotide
ctgagagccgagtcccatgtt

SEQ ID NO: 585 - DNA, 21 bp, Artificial Sequence
  Description of Artificial Sequence: Synthetic oligonucleotide
tcatttgtccacagtgtacca

SEQ ID NO: 586 - DNA, 21 bp, Artificial Sequence
  Description of Artificial Sequence: Synthetic oligonucleotide
acccaaccatcttccttcatg

SEQ ID NO: 587 - DNA, 21 bp, Artificial Sequence
  Description of Artificial Sequence: Synthetic oligonucleotide
tccacagtgtaccacatgaag

SEQ ID NO: 588 - DNA, 21 bp, Artificial Sequence
  Description of Artificial Sequence: Synthetic oligonucleotide
tactttcacccaaccatcttc

SEQ ID NO: 589 - DNA, 21 bp, Artificial Sequence
  Description of Artificial Sequence: Synthetic oligonucleotide
acgggggcgttgtgatgggtt

SEQ ID NO: 590 - DNA, 21 bp, Artificial Sequence
  Description of Artificial Sequence: Synthetic oligonucleotide
ctcaccctgcagacactcggg

SEQ ID NO: 591 - DNA, 21 bp, Artificial Sequence
  Description of Artificial Sequence: Synthetic oligonucleotide
cctcaggatagaactggagga

SEQ ID NO: 592 - DNA, 21 bp, Artificial Sequence
  Description of Artificial Sequence: Synthetic oligonucleotide
tcaccacatttgcagcagcca

SEQ ID NO: 593 - DNA, 21 bp, Artificial Sequence
  Description of Artificial Sequence: Synthetic oligonucleotide
gctgctgcaaatgtggtgaga

SEQ ID NO: 594 - DNA, 21 bp, Artificial Sequence
  Description of Artificial Sequence: Synthetic oligonucleotide
ggagaaactcacctgacctcc

SEQ ID NO: 595 - DNA, 21 bp, Artificial Sequence
  Description of Artificial Sequence: Synthetic oligonucleotide
acctgaggatccctttcccag

SEQ ID NO: 596 - DNA, 21 bp, Artificial Sequence
  Description of Artificial Sequence: Synthetic oligonucleotide
ccaggtatatggaaccctggg

SEQ ID NO: 597 - DNA, 21 bp, Artificial Sequence
  Description of Artificial Sequence: Synthetic oligonucleotide
tctatggttatgtggatgcag

SEQ ID NO: 598 - DNA, 21 bp, Artificial Sequence
  Description of Artificial Sequence: Synthetic oligonucleotide
gcagttcattgcccaagatga

SEQ ID NO: 599 - DNA, 21 bp, Artificial Sequence
  Description of Artificial Sequence: Synthetic oligonucleotide
accacattatctgtaagtagg

SEQ ID NO: 600 - DNA, 21 bp, Artificial Sequence
  Description of Artificial Sequence: Synthetic oligonucleotide
gctaaaagatacctacttaca

SEQ ID NO: 601 - DNA, 21 bp, Artificial Sequence
  Description of Artificial Sequence: Synthetic oligonucleotide
gtgccagaaagattacatgca

SEQ ID NO: 602 - DNA, 21 bp, Artificial Sequence
  Description of Artificial Sequence: Synthetic oligonucleotide
attaccaggtaccatgcagag

SEQ ID NO: 603 - DNA, 21 bp, Artificial Sequence
  Description of Artificial Sequence: Synthetic oligonucleotide
ttctcagactccacatcattc

SEQ ID NO: 604 - DNA, 21 bp, Artificial Sequence
  Description of Artificial Sequence: Synthetic oligonucleotide
atctctatcaatacttgcaaa

SEQ ID NO: 605 - DNA, 21 bp, Artificial Sequence
  Description of Artificial Sequence: Synthetic oligonucleotide
gcaggtgctttgcaagtattg

SEQ ID NO: 606 - DNA, 21 bp, Artificial Sequence
  Description of Artificial Sequence: Synthetic oligonucleotide
cctgattcagagctaatgcca

SEQ ID NO: 607 - DNA, 21 bp, Artificial Sequence
  Description of Artificial Sequence: Synthetic oligonucleotide
gctgtggcattagctctgaat

SEQ ID NO: 608 - DNA, 21 bp, Artificial Sequence
  Description of Artificial Sequence: Synthetic oligonucleotide
atagcaacgtgtgagatttcc

SEQ ID NO: 609 - DNA, 21 bp, Artificial Sequence
  Description of Artificial Sequence: Synthetic oligonucleotide
tgtagctcagagccaagtaca

SEQ ID NO: 610 - DNA, 21 bp, Artificial Sequence
  Description of Artificial Sequence: Synthetic oligonucleotide
gcaagatcatcagagagatct

SEQ ID NO: 611 - DNA, 21 bp, Artificial Sequence
  Description of Artificial Sequence: Synthetic oligonucleotide
acttgcatcagatattgctac

SEQ ID NO: 612 - DNA, 21 bp, Artificial Sequence
  Description of Artificial Sequence: Synthetic oligonucleotide
gtacttacactctcagaaccc

SEQ ID NO: 613 - DNA, 21 bp, Artificial Sequence
  Description of Artificial Sequence: Synthetic oligonucleotide
aggatccgctctgcccagtca

SEQ ID NO: 614 - DNA, 21 bp, Artificial Sequence
  Description of Artificial Sequence: Synthetic oligonucleotide
gtacctctgcagaagaggacg

SEQ ID NO: 615 - DNA, 21 bp, Artificial Sequence
  Description of Artificial Sequence: Synthetic oligonucleotide
gatgaccgttcccgaggtgca

SEQ ID NO: 616 - DNA, 21 bp, Artificial Sequence
  Description of Artificial Sequence: Synthetic oligonucleotide
gctggtggagcctgcccactg

SEQ ID NO: 617 - DNA, 21 bp, Artificial Sequence
  Description of Artificial Sequence: Synthetic oligonucleotide
gcatcacttgctgtatcctct

SEQ ID NO: 618 - DNA, 21 bp, Artificial Sequence
  Description of Artificial Sequence: Synthetic oligonucleotide
gcttctgctgcccttgatgac

SEQ ID NO: 619 - DNA, 21 bp, Artificial Sequence
  Description of Artificial Sequence: Synthetic oligonucleotide
cccatggagcttacccagcct

SEQ ID NO: 620 - DNA, 21 bp, Artificial Sequence
  Description of Artificial Sequence: Synthetic oligonucleotide
cctgcacccctgagcctgtga

SEQ ID NO: 621 - DNA, 21 bp, Artificial Sequence
  Description of Artificial Sequence: Synthetic oligonucleotide
ccagcaggcagctccctgaag

SEQ ID NO: 622 - DNA, 21 bp, Artificial Sequence
  Description of Artificial Sequence: Synthetic oligonucleotide
gagagattgagaccgttcgct

SEQ ID NO: 623 - DNA, 21 bp, Artificial Sequence
  Description of Artificial Sequence: Synthetic oligonucleotide
ccaggatgtgggggtcggcac

SEQ ID NO: 624 - DNA, 21 bp, Artificial Sequence
  Description of Artificial Sequence: Synthetic oligonucleotide
tcctgcccctacccacgacag

SEQ ID NO: 625 - DNA, 21 bp, Artificial Sequence
  Description of Artificial Sequence: Synthetic oligonucleotide
acgtggttcccgcgcacagcg

SEQ ID NO: 626 - DNA, 21 bp, Artificial Sequence
  Description of Artificial Sequence: Synthetic oligonucleotide
cagcccgaggcgctgacctca

SEQ ID NO: 627 - DNA, 21 bp, Artificial Sequence
  Description of Artificial Sequence: Synthetic oligonucleotide
cggtatcccagggccacggca

SEQ ID NO: 628 - DNA, 21 bp, Artificial Sequence
  Description of Artificial Sequence: Synthetic oligonucleotide
cctgccccatctcagtgcaac

SEQ ID NO: 629 - DNA, 21 bp, Artificial Sequence
  Description of Artificial Sequence: Synthetic oligonucleotide
gaggatctagaggacgaggag

SEQ ID NO: 630 - DNA, 21 bp, Artificial Sequence
  Description of Artificial Sequence: Synthetic oligonucleotide
tacttgtccttgtacatcttg

SEQ ID NO: 631 - DNA, 21 bp, Artificial Sequence
  Description of Artificial Sequence: Synthetic oligonucleotide
ccgcgctgccagtcgaggcag

SEQ ID NO: 632 - DNA, 21 bp, Artificial Sequence
  Description of Artificial Sequence: Synthetic oligonucleotide
acaatggagagtatgttatct

SEQ ID NO: 633 - DNA, 21 bp, Artificial Sequence
  Description of Artificial Sequence: Synthetic oligonucleotide
gggatcgtcctgcaagaccta

SEQ ID NO: 634 - DNA, 21 bp, Artificial Sequence
  Description of Artificial Sequence: Synthetic oligonucleotide
gaacaagtgttaaatcaaaaa

SEQ ID NO: 635 - DNA, 21 bp, Artificial Sequence
  Description of Artificial Sequence: Synthetic oligonucleotide
taagtcgttactaagaagtcc

SEQ ID NO: 636 - DNA, 21 bp, Artificial Sequence
  Description of Artificial Sequence: Synthetic oligonucleotide
tgtaaaaattgcactacttct

SEQ ID NO: 637 - DNA, 21 bp, Artificial Sequence
  Description of Artificial Sequence: Synthetic oligonucleotide
cagaaacagcaacagctatta

SEQ ID NO: 638 - DNA, 21 bp, Artificial Sequence
  Description of Artificial Sequence: Synthetic oligonucleotide
gagcaaagacaacagcagttt

SEQ ID NO: 639 - DNA, 21 bp, Artificial Sequence
  Description of Artificial Sequence: Synthetic oligonucleotide
gcaccagaggacccaccacgt

SEQ ID NO: 640 - DNA, 21 bp, Artificial Sequence
  Description of Artificial Sequence: Synthetic oligonucleotide
tatccacaggacgtggtgggt

SEQ ID NO: 641 - DNA, 21 bp, Artificial Sequence
  Description of Artificial Sequence: Synthetic oligonucleotide
taggagccaaaaacctgtata

SEQ ID NO: 642 - DNA, 21 bp, Artificial Sequence
  Description of Artificial Sequence: Synthetic oligonucleotide
gttgtcgaatgaccactgctg

SEQ ID NO: 643 - DNA, 21 bp, Artificial Sequence
  Description of Artificial Sequence: Synthetic oligonucleotide
ttctctcagtacatccagcag

SEQ ID NO: 644 - DNA, 21 bp, Artificial Sequence
  Description of Artificial Sequence: Synthetic oligonucleotide
aagataatgcaggagtcatag

SEQ ID NO: 645 - DNA, 21 bp, Artificial Sequence
  Description of Artificial Sequence: Synthetic oligonucleotide
ctacctttcatctcgccttta

SEQ ID NO: 646 - DNA, 21 bp, Artificial Sequence
  Description of Artificial Sequence: Synthetic oligonucleotide
atgcaggttctgccattacag

SEQ ID NO: 647 - DNA, 21 bp, Artificial Sequence
  Description of Artificial Sequence: Synthetic oligonucleotide
caaatatactggagaatcatg

SEQ ID NO: 648 - DNA, 21 bp, Artificial Sequence
  Description of Artificial Sequence: Synthetic oligonucleotide
ccttccctttatatccacagg

SEQ ID NO: 649 - DNA, 21 bp, Artificial Sequence
  Description of Artificial Sequence: Synthetic oligonucleotide
ctggcgccgttgacgcgcacg

SEQ ID NO: 650 - DNA, 21 bp, Artificial Sequence
  Description of Artificial Sequence: Synthetic oligonucleotide
ttgtgctgcatacggagccgc

SEQ ID NO: 651 - DNA, 21 bp, Artificial Sequence
  Description of Artificial Sequence: Synthetic oligonucleotide
atgtggctgagttggaccagt

SEQ ID NO: 652 - DNA, 21 bp, Artificial Sequence
  Description of Artificial Sequence: Synthetic oligonucleotide
gcatccacaccaggtggtgag

SEQ ID NO: 653 - DNA, 21 bp, Artificial Sequence
  Description of Artificial Sequence: Synthetic oligonucleotide
actactctgaccatcagccct

SEQ ID NO: 654 - DNA, 21 bp, Artificial Sequence
  Description of Artificial Sequence: Synthetic oligonucleotide
gggccgggacagtgtcgtata

SEQ ID NO: 655 - DNA, 21 bp, Artificial Sequence
  Description of Artificial Sequence: Synthetic oligonucleotide
tcttagttgcttcactagttt

SEQ ID NO: 656 - DNA, 21 bp, Artificial Sequence
  Description of Artificial Sequence: Synthetic oligonucleotide
gtgggtgtccatgccttaact

SEQ ID NO: 657 - DNA, 21 bp, Artificial Sequence
  Description of Artificial Sequence: Synthetic oligonucleotide
gcttgtagaccctggagttaa

SEQ ID NO: 658 - DNA, 21 bp, Artificial Sequence
  Description of Artificial Sequence: Synthetic oligonucleotide
ccactcccttgcaatccaaca

SEQ ID NO: 659 - DNA, 21 bp, Artificial Sequence
  Description of Artificial Sequence: Synthetic oligonucleotide
tcacccagctagcatattatt

SEQ ID NO: 660 - DNA, 21 bp, Artificial Sequence
  Description of Artificial Sequence: Synthetic oligonucleotide
atatgtgcagacacattcaga

SEQ ID NO: 661 - DNA, 21 bp, Artificial Sequence
  Description of Artificial Sequence: Synthetic oligonucleotide
attggtacaggggaacatata

SEQ ID NO: 662 - DNA, 21 bp, Artificial Sequence
  Description of Artificial Sequence: Synthetic oligonucleotide
gcaccatccgtactgtctagt

SEQ ID NO: 663 - DNA, 21 bp, Artificial Sequence
  Description of Artificial Sequence: Synthetic oligonucleotide
gtaaacaaccaggaagaatcc

SEQ ID NO: 664 - DNA, 21 bp, Artificial Sequence
  Description of Artificial Sequence: Synthetic oligonucleotide
ccctcaggtggcgacatgtct

SEQ ID NO: 665 - DNA, 21 bp, Artificial Sequence
  Description of Artificial Sequence: Synthetic oligonucleotide
aggataactaaccaagatctg

SEQ ID NO: 666 - DNA, 21 bp, Artificial Sequence
  Description of Artificial Sequence: Synthetic oligonucleotide
catgggaaaactgtcatcata

SEQ ID NO: 667 - DNA, 21 bp, Artificial Sequence
  Description of Artificial Sequence: Synthetic oligonucleotide
taaccactgtgccaggtactg

SEQ ID NO: 668 - DNA, 21 bp, Artificial Sequence
  Description of Artificial Sequence: Synthetic oligonucleotide
atgacctcctgtcacagctgg

SEQ ID NO: 669 - DNA, 21 bp, Artificial Sequence
  Description of Artificial Sequence: Synthetic oligonucleotide
ttctaaccactcaaatctagg

SEQ ID NO: 670 - DNA, 21 bp, Artificial Sequence
  Description of Artificial Sequence: Synthetic oligonucleotide
aggaagacccaatccagatgt

SEQ ID NO: 671 - DNA, 21 bp, Artificial Sequence
  Description of Artificial Sequence: Synthetic oligonucleotide
tagtgtatagagcatgaaatc

SEQ ID NO: 672 - DNA, 21 bp, Artificial Sequence
  Description of Artificial Sequence: Synthetic oligonucleotide
tgatcactctttgccacacca

SEQ ID NO: 673 - DNA, 21 bp, Artificial Sequence
  Description of Artificial Sequence: Synthetic oligonucleotide
cctgacatcattcgcaattac

SEQ ID NO: 674 - DNA, 21 bp, Artificial Sequence
  Description of Artificial Sequence: Synthetic oligonucleotide
gatacagatacttcaggggat

SEQ ID NO: 675 - DNA, 21 bp, Artificial Sequence
  Description of Artificial Sequence: Synthetic oligonucleotide
gtcacccttctagacttcaga

SEQ ID NO: 676 - DNA, 21 bp, Artificial Sequence
  Description of Artificial Sequence: Synthetic oligonucleotide
gagtgaaggtatcggctgagc

SEQ ID NO: 677 - DNA, 21 bp, Artificial Sequence
  Description of Artificial Sequence: Synthetic oligonucleotide
agcccccagacctggctatgg

SEQ ID NO: 678 - DNA, 21 bp, Artificial Sequence
  Description of Artificial Sequence: Synthetic oligonucleotide
aggagaaacctgtctggttct

SEQ ID NO: 679 - DNA, 21 bp, Artificial Sequence
  Description of Artificial Sequence: Synthetic oligonucleotide
cttctgcccaagaaggtggga

SEQ ID NO: 680 - DNA, 21 bp, Artificial Sequence
  Description of Artificial Sequence: Synthetic oligonucleotide
gggaaaagctgcaagaaataa

SEQ ID NO: 681 - DNA, 21 bp, Artificial Sequence
  Description of Artificial Sequence: Synthetic oligonucleotide
aggtatgctgctgaaagtggg

SEQ ID NO: 682 - DNA, 21 bp, Artificial Sequence
  Description of Artificial Sequence: Synthetic oligonucleotide
tctgaggagcccacagccttc

SEQ ID NO: 683 - DNA, 21 bp, Artificial Sequence
  Description of Artificial Sequence: Synthetic oligonucleotide
ggtaggcaaaggagacatctt

SEQ ID NO: 684 - DNA, 21 bp, Artificial Sequence
  Description of Artificial Sequence: Synthetic oligonucleotide
cctacccaaaccgcccagatg

SEQ ID NO: 685 - DNA, 21 bp, Artificial Sequence
  Description of Artificial Sequence: Synthetic oligonucleotide
gaagaagtcttcaagaaaata

SEQ ID NO: 686 - DNA, 21 bp, Artificial Sequence
  Description of Artificial Sequence: Synthetic oligonucleotide
gcagcccccacagccctccca

SEQ ID NO: 687 - DNA, 21 bp, Artificial Sequence
  Description of Artificial Sequence: Synthetic oligonucleotide
aggtgagacattaatccctca

SEQ ID NO: 688 - DNA, 21 bp, Artificial Sequence
  Description of Artificial Sequence: Synthetic oligonucleotide
aaggaagccagttactcatca

SEQ ID NO: 689 - DNA, 21 bp, Artificial Sequence
  Description of Artificial Sequence: Synthetic oligonucleotide
cagaccctggtatacatatat

SEQ ID NO: 690 - DNA, 21 bp, Artificial Sequence
  Description of Artificial Sequence: Synthetic oligonucleotide
gctgtcggtccatgtaggaga

SEQ ID NO: 691 - DNA, 21 bp, Artificial Sequence
  Description of Artificial Sequence: Synthetic oligonucleotide
tcctacatggaccgacagcca

SEQ ID NO: 692 - DNA, 21 bp, Artificial Sequence
  Description of Artificial Sequence: Synthetic oligonucleotide
acaaccccctgcagagtggtg

SEQ ID NO: 693 - DNA, 21 bp, Artificial Sequence
  Description of Artificial Sequence: Synthetic oligonucleotide
atccagcagcacctgtccccc

SEQ ID NO: 694 - DNA, 21 bp, Artificial Sequence
  Description of Artificial Sequence: Synthetic oligonucleotide
agttgggcaggagcctgtgct

SEQ ID NO: 695 - DNA, 21 bp, Artificial Sequence
  Description of Artificial Sequence: Synthetic oligonucleotide
tagaagatacctgtgtatatt

SEQ ID NO: 696 - DNA, 21 bp, Artificial Sequence
  Description of Artificial Sequence: Synthetic oligonucleotide
cgctcgcatcctccacgaacc

SEQ ID NO: 697 - DNA, 21 bp, Artificial Sequence
  Description of Artificial Sequence: Synthetic oligonucleotide
gcagaggcggggagaggcacg

SEQ ID NO: 698 - DNA, 21 bp, Artificial Sequence
  Description of Artificial Sequence: Synthetic oligonucleotide
cctacatgccccccacctccg

SEQ ID NO: 699 - DNA, 21 bp, Artificial Sequence
  Description of Artificial Sequence: Synthetic oligonucleotide
ggctagagtggcgacgccagc

SEQ ID NO: 700 - DNA, 21 bp, Artificial Sequence
  Description of Artificial Sequence: Synthetic oligonucleotide
aggagggcacctatctggcca

SEQ ID NO: 701 - DNA, 21 bp, Artificial Sequence
  Description of Artificial Sequence: Synthetic oligonucleotide
gtcctctttccccagaacccc

SEQ ID NO: 702 - DNA, 21 bp, Artificial Sequence
  Description of Artificial Sequence: Synthetic oligonucleotide
cccagaaccccccaaagtgtc

SEQ ID NO: 703 - DNA, 21 bp, Artificial Sequence
  Description of Artificial Sequence: Synthetic oligonucleotide
agggccctcccttgaggacag

SEQ ID NO: 704 - DNA, 21 bp, Artificial Sequence
  Description of Artificial Sequence: Synthetic oligonucleotide
ctgtctgcctttcttctgctt

SEQ ID NO: 705 - DNA, 21 bp, Artificial Sequence
  Description of Artificial Sequence: Synthetic oligonucleotide
cccacagctgtctacctgtcc

SEQ ID NO: 706 - DNA, 21 bp, Artificial Sequence
  Description of Artificial Sequence: Synthetic oligonucleotide
cacagcaagtgaagatgttaa

SEQ ID NO: 707 - DNA, 21 bp, Artificial Sequence
  Description of Artificial Sequence: Synthetic oligonucleotide
atagagcaacttgtgattgga

SEQ ID NO: 708 - DNA, 21 bp, Artificial Sequence
  Description of Artificial Sequence: Synthetic oligonucleotide
cccctgttggaggacaaacaa

SEQ ID NO: 709 - DNA, 21 bp, Artificial Sequence
  Description of Artificial Sequence: Synthetic oligonucleotide
atgtggccacctccaaattcc

SEQ ID NO: 710 - DNA, 21 bp, Artificial Sequence
  Description of Artificial Sequence: Synthetic oligonucleotide
gaggtggccacattaaagatg

SEQ ID NO: 711 - DNA, 21 bp, Artificial Sequence
  Description of Artificial Sequence: Synthetic oligonucleotide
atctgtcgtagttcttcctca

SEQ ID NO: 712 - DNA, 21 bp, Artificial Sequence
  Description of Artificial Sequence: Synthetic oligonucleotide
cagatcgagatagacaatggg

SEQ ID NO: 713 - DNA, 21 bp, Artificial Sequence
  Description of Artificial Sequence: Synthetic oligonucleotide
tgaagaagtacatcccaagca

SEQ ID NO: 714 - DNA, 21 bp, Artificial Sequence
  Description of Artificial Sequence: Synthetic oligonucleotide
atgtgatgactttaatcagta

SEQ ID NO: 715 - DNA, 21 bp, Artificial Sequence
  Description of Artificial Sequence: Synthetic oligonucleotide
aaataggtgggctacctttct

SEQ ID NO: 716 - DNA, 21 bp, Artificial Sequence
  Description of Artificial Sequence: Synthetic oligonucleotide
tctctggcctggtactggcta

SEQ ID NO: 717 - DNA, 21 bp, Artificial Sequence
  Description of Artificial Sequence: Synthetic oligonucleotide
ccctttagtgagccccttcaa

SEQ ID NO: 718 - DNA, 21 bp, Artificial Sequence
  Description of Artificial Sequence: Synthetic oligonucleotide
gtgagccccttcaagatacct

SEQ ID NO: 719 - DNA, 21 bp, Artificial Sequence
  Description of Artificial Sequence: Synthetic oligonucleotide
tgaattgcaataccagcatca

SEQ ID NO: 720 - DNA, 21 bp, Artificial Sequence
  Description of Artificial Sequence: Synthetic oligonucleotide
ccaggtccagtcttgtaatgt

SEQ ID NO: 721 - DNA, 21 bp, Artificial Sequence
  Description of Artificial Sequence: Synthetic oligonucleotide
tccttgtatatatctgtccca

SEQ ID NO: 722 - DNA, 21 bp, Artificial Sequence
  Description of Artificial Sequence: Synthetic oligonucleotide
ggagtcttctgctttgctgga

SEQ ID NO: 723 - DNA, 21 bp, Artificial Sequence
  Description of Artificial Sequence: Synthetic oligonucleotide
ctggacatgagactggaaggc

SEQ ID NO: 724 - DNA, 21 bp, Artificial Sequence
  Description of Artificial Sequence: Synthetic oligonucleotide
tcttctcctctcttagcccct

SEQ ID NO: 725 - DNA, 21 bp, Artificial Sequence
  Description of Artificial Sequence: Synthetic oligonucleotide
ctccaaggtggctgtactgag

SEQ ID NO: 726 - DNA, 21 bp, Artificial Sequence
  Description of Artificial Sequence: Synthetic oligonucleotide
gctcctgtagcgctgctgggc

SEQ ID NO: 727 - DNA, 21 bp, Artificial Sequence
  Description of Artificial Sequence: Synthetic oligonucleotide
gggaaggctggcatgggcaag

SEQ ID NO: 728 - DNA, 21 bp, Artificial Sequence
  Description of Artificial Sequence: Synthetic oligonucleotide
caggccctgttcctttttgaa

SEQ ID NO: 729 - DNA, 21 bp, Artificial Sequence
  Description of Artificial Sequence: Synthetic oligonucleotide
aattccgccagctcaacttga

SEQ ID NO: 730 - DNA, 21 bp, Artificial Sequence
  Description of Artificial Sequence: Synthetic oligonucleotide
atctgtacctgagccctgaat

SEQ ID NO: 731 - DNA, 21 bp, Artificial Sequence
  Description of Artificial Sequence: Synthetic oligonucleotide
atgggctagatgaggccctcc

SEQ ID NO: 732 - DNA, 21 bp, Artificial Sequence
  Description of Artificial Sequence: Synthetic oligonucleotide
tcccatctctgcaatgggacc

SEQ ID NO: 733 - DNA, 21 bp, Artificial Sequence
  Description of Artificial Sequence: Synthetic oligonucleotide
atgggccacgggtggaagaat

SEQ ID NO: 734 - DNA, 21 bp, Artificial Sequence
  Description of Artificial Sequence: Synthetic oligonucleotide
tctgtaactccaccagggccc

SEQ ID NO: 735 - DNA, 21 bp, Artificial Sequence
  Description of Artificial Sequence: Synthetic oligonucleotide
catagaagataaccttccctg

SEQ ID NO: 736 - DNA, 21 bp, Artificial Sequence
  Description of Artificial Sequence: Synthetic oligonucleotide
gggccactcacagcctgctga

SEQ ID NO: 737 - DNA, 21 bp, Artificial Sequence
  Description of Artificial Sequence: Synthetic oligonucleotide
acccacctcagcctgcaggag

SEQ ID NO: 738 - DNA, 21 bp, Artificial Sequence
  Description of Artificial Sequence: Synthetic oligonucleotide
ttcaccttggggctggccatc

SEQ ID NO: 739 - DNA, 21 bp, Artificial Sequence
  Description of Artificial Sequence: Synthetic oligonucleotide
ttgctgccctgcacctgatgg

SEQ ID NO: 740 - DNA, 21 bp, Artificial Sequence
  Description of Artificial Sequence: Synthetic oligonucleotide
gtccgctgtacccagcgggaa

SEQ ID NO: 741 - DNA, 21 bp, Artificial Sequence
  Description of Artificial Sequence: Synthetic oligonucleotide
gccctgtgagcttgcgggtgg

SEQ ID NO: 742 - DNA, 21 bp, Artificial Sequence
  Description of Artificial Sequence: Synthetic oligonucleotide
tgcggtgagactggccagctc

SEQ ID NO: 743 - DNA, 21 bp, Artificial Sequence
  Description of Artificial Sequence: Synthetic oligonucleotide
ccactgacctgcaccgacctg

SEQ ID NO: 744 - DNA, 21 bp, Artificial Sequence
  Description of Artificial Sequence: Synthetic oligonucleotide
atggctgtcccctggagcccc

SEQ ID NO: 745-762 - skipped (18 entries)

SEQ ID NO: 763 - DNA, 21 bp, Artificial Sequence
  Description of Artificial Sequence: Synthetic oligonucleotide
gtcctttccacaagatatata

SEQ ID NO: 764 - DNA, 21 bp, Artificial Sequence
  Description of Artificial Sequence: Synthetic oligonucleotide
gatttcttggctttatatatc

SEQ ID NO: 765 - DNA, 21 bp, Artificial Sequence
  Description of Artificial Sequence: Synthetic oligonucleotide
ttggctttatatatcttgtgg

SEQ ID NO: 766 - DNA, 21 bp, Artificial Sequence
  Description of Artificial Sequence: Synthetic oligonucleotide
gctttatatatcttgtggaaa

SEQ ID NO: 767 - DNA, 21 bp, Artificial Sequence
  Description of Artificial Sequence: Synthetic oligonucleotide
atatatcttgtggaaaggacg

SEQ ID NO: 768 - DNA, 21 bp, Artificial Sequence
  Description of Artificial Sequence: Synthetic oligonucleotide
tatatcttgtggaaaggacga

SEQ ID NO: 769 - DNA, 21 bp, Artificial Sequence
  Description of Artificial Sequence: Synthetic oligonucleotide
tggaaaggacgaaacaccgtg

SEQ ID NO: 770 - DNA, 21 bp, Artificial Sequence
  Description of Artificial Sequence: Synthetic oligonucleotide
ttgcagaagcgggcccaggat

SEQ ID NO: 771 - DNA, 21 bp, Artificial Sequence
  Description of Artificial Sequence: Synthetic oligonucleotide
ttgcagaagcgggcccaggat

SEQ ID NO: 772 - DNA, 21 bp, Artificial Sequence
  Description of Artificial Sequence: Synthetic oligonucleotide
tatgctgaacacctgatgccg

SEQ ID NO: 773 - DNA, 21 bp, Artificial Sequence
  Description of Artificial Sequence: Synthetic oligonucleotide
ccagggtcggccggtgcccgt

SEQ ID NO: 774 - DNA, 21 bp, Artificial Sequence
  Description of Artificial Sequence: Synthetic oligonucleotide
gccggtggagccgccgccgga

SEQ ID NO: 775 - DNA, 21 bp, Artificial Sequence
  Description of Artificial Sequence: Synthetic oligonucleotide
tgggcaagggcggctttgcca

SEQ ID NO: 776 - DNA, 21 bp, Artificial Sequence
  Description of Artificial Sequence: Synthetic oligonucleotide
gggcaagggcggctttgccaa

SEQ ID NO: 777 - DNA, 21 bp, Artificial Sequence
  Description of Artificial Sequence: Synthetic oligonucleotide
ggcaagggcggctttgccaag

SEQ ID NO: 778 - DNA, 21 bp, Artificial Sequence
  Description of Artificial Sequence: Synthetic oligonucleotide
ccaagtgcttcgagatctcgg

SEQ ID NO: 779 - DNA, 21 bp, Artificial Sequence
  Description of Artificial Sequence: Synthetic oligonucleotide
catggacatcttctccctctg

SEQ ID NO: 780 - DNA, 21 bp, Artificial Sequence
  Description of Artificial Sequence: Synthetic oligonucleotide
tcgaggacaacgacttcgtgt

SEQ ID NO: 781 - DNA, 21 bp, Artificial Sequence
  Description of Artificial Sequence: Synthetic oligonucleotide
cgaggacaacgacttcgtgtt

SEQ ID NO: 782 - DNA, 21 bp, Artificial Sequence
  Description of Artificial Sequence: Synthetic oligonucleotide
gaggacaacgacttcgtgttc

SEQ ID NO: 783 - DNA, 21 bp, Artificial Sequence
  Description of Artificial Sequence: Synthetic oligonucleotide
cagttaaaaaccaccacaaca

SEQ ID NO: 784 - DNA, 21 bp, Artificial Sequence
  Description of Artificial Sequence: Synthetic oligonucleotide
gctgaatggccgggaggagga

SEQ ID NO: 785 - DNA, 21 bp, Artificial Sequence
  Description of Artificial Sequence: Synthetic oligonucleotide
tggagtggcagatgggagagc

SEQ ID NO: 786 - DNA, 21 bp, Artificial Sequence
  Description of Artificial Sequence: Synthetic oligonucleotide
aaccatgagggaaatcgtgca

SEQ ID NO: 787 - DNA, 21 bp, Artificial Sequence
  Description of Artificial Sequence: Synthetic oligonucleotide
accatgagggaaatcgtgcac

SEQ ID NO: 788 - DNA, 21 bp, Artificial Sequence
  Description of Artificial Sequence: Synthetic oligonucleotide
ttctctgtaggtggcaaatat

SEQ ID NO: 789 - protein, 1364 aa, Artificial Sequence
  Description of Artificial Sequence: Synthetic polypeptide
MGHHHHHHSSGLVPRGSGTMAAFDKFIHQYQVSKTLRFALIPQGKTLENTKNNVLQEDDERQKNYEKVKPILDRIYKVFAEESLKDCSVDWNDLNACLDAYQKNPSADKRQKVKAAQDALRDEIAGYFTGKQYANGKNKNAVKEKEQAELYKDIFSKKIFDGTVTNNKLPQVNLSAEETELLGCFDKFTTYFVGFYQNRENVFSGEDIATAIPHRIVQDNFPKFRENCRIYQDLIKNEPALKPLLQQAAAAVMAQNPKGIYQPRKSLDDIFVIPFYNHLLLQDDIDYFNQILGGISGAAGQKKIQGLNETINLFMQQHPQEADKLKKKKIRHRFIPLYKQILSDRTSFSFIPEAFSNSQEALDGIETFKKSLKKNDTFGALERLIQNLASLDLKYVYLSNKKVNEISQALYGEWHCIQDVLKQDFSLESLIQINPQNSSNGFLATLTDEGKKRISQCRNVLGNPLPVKLADDQDKAQVKNQLDTLLAAVHYLEWFKADPDLETDPNFTVPFEKIWEELVPLLSLYSKVRNFVTKKPYSTAKFKLNFANPTLADGWDIHKESDNGALLFEKGGLYYLGIMNPKDKPNFKSYQGAEPYYQKMVYRFFPDCSKTIPKCSTQRKDVKKYFEDHPQATSYQIHDSKKEKFRQDFFEIPREIYELNNTTYGTGKSKYKKFQTQYYQKTQDKSGYQKALRKWIDFSKKFLQTYVSTSIFDFKGLRPSKDYQDLGEFYKDVNSRCYRVTFEKIRVQDIHEAVKNGQLYLFQLYNKDFSPKSHGLPNLHTLYWKAVFDPENLKDPIVKLNGQAELFYRPKSNMQIIQHKTGEEIVNKKLKDGTPVPDDIYREISAYVQGKCQGNLSPEAEKWLPSVTIKKAAHDITKDRRFTEDKFFFHVPITLNYQSSGKPTAFNSQVNDFLTEHPETNIIGIDRGERNLIYAVVITPDGKILEQKSFNVIHDFDYHESLSQREKQRVAARQAWTAIGRIKDLKEGYLSLVVHEIAQMMIKYQAVVVLENLNTGFKRVRGGISEKAVYQQFEKMLIEKLNFLVFKDRAINQEGGVLKAYQLTDSFTSFAKLGNQSGFLFYIPSAYTSKIDPGTGFVDPFIWSHVTASEENRNEFLKGFDSLKYDAQSSAFVLHFKMKSNKQFQKNNVEGFMPEWDICFEKNEEKISLQGSKYTAGKRIIFDSKKKQYMECFPQNELMKALQDVGITWNTGNDIWQDVLKQASTDTGFRHRMINLIRSVLQMRSSNGATGEDYINSPVMDLDGRFFDTRAGIRDLPLDADANGAYHIALKGRMVLERIRSQKNTAIKNTDWLYAIQEERNGAPKRPAATKKAGQAKKKKASGSGAGSPKKKRKVEDPKKKRKV

SEQ ID NO: 790 - DNA, 4098 bp, Artificial Sequence
  Description of Artificial Sequence: Synthetic polynucleotide
atgggccaccatcatcatcatcatagcagcggcctggtgccgcgcggcagcggtaccatggcggcgttcgataagttcatccatcaatatcaagtaagcaaaaccctccgttttgcacttattccgcaggggaaaaccttggagaatacaaaaaataacgtactccaggaagatgatgagcgtcagaaaaattacgaaaaagtcaaacctatccttgatcgtatttataaggtattcgctgaggaaagcctgaaagattgcagcgttgactggaatgacctcaatgcatgtctggatgcttaccaaaaaaatcctagcgcggataagcgtcagaaggtgaaagccgcgcaggacgcgttgcgggacgaaattgccggttattttacagggaaacaatacgcgaacgggaagaacaaaaatgccgttaaggagaaagagcaggcagaattgtataaggatatctttagcaaaaagatctttgatgggaccgtaacgaacaacaaattgccacaggtcaacctttcagccgaagaaacagagttattaggctgttttgataaattcacaacatatttcgtcggcttttaccagaaccgtgagaacgtattttcaggggaggatattgctacagctattccgcatcggatcgtccaggataattttcctaaattccgggaaaactgtcggatttatcaggacttaatcaaaaatgaacctgcccttaaaccgctgcttcagcaagcagcggccgcggtgatggcccagaatccaaaggggatctatcaaccacgtaagagtctggacgatatttttgtcattccgttttataaccatctcctcttacaggatgatattgattatttcaatcaaatcttaggcggcatttcgggggcagccggtcagaaaaaaatccagggtttaaatgaaacaattaatctgtttatgcaacagcacccacaagaagccgataagttaaagaaaaaaaagattcgtcatcggtttattccgctgtataaacaaattctctctgaccgtacgtctttctcgttcatccctgaagctttttccaattctcaggaagcgttagacggcattgagacattcaaaaagtctcttaagaagaatgacacattcggcgcgttggagcggctgattcaaaatcttgcttccctggacctgaaatacgtgtatttatcgaacaagaaggtcaatgagatttcgcaggcattatacggcgaatggcactgcatccaagacgtcctcaagcaagatttcagccttgagagcctgatccagatcaacccacaaaattctagcaatggtttcctggccacacttaccgacgaaggcaagaaacgtatctcccaatgtcgtaacgtactggggaatcctcttccagtcaagcttgcggatgatcaagacaaagcgcaagtcaaaaaccaattggatacattactggctgctgtacactatctcgagtggttcaaggcagatccagacctggaaacagaccctaacttcactgttcctttcgaaaagatctgggaggaattggttcctttactttcactgtactctaaagttcggaattttgttacaaagaagccatattctacagctaaatttaaactgaactttgctaacccgacattagcggatgggtgggatattcacaaggaaagtgataacggcgcgctcctgtttgaaaagggtggtttgtattacttgggtatcatgaaccctaaagataagcctaattttaaatcctatcagggtgcagagccatactatcagaagatggtgtaccgtttttttcctgactgttcgaagaccatcccaaaatgcagcacccaacgtaaggatgtaaaaaagtacttcgaagaccaccctcaagcgacctcataccagatccacgactcaaagaaagagaagtttcgtcaggatttttttgagatccctcgggagatttacgagcttaataacaccacatacggcacaggtaagtctaaatataaaaaattccagacccagtattaccagaagactcaggataagtcaggctatcagaaagcacttcgcaaatggattgacttttccaaaaagtttcttcaaacatacgtcagtacttccatttttgatttcaaaggtctccgtccttcgaaggattatcaggacttaggcgagttctataaagacgttaattcgcgttgttaccgtgtgacgttcgagaaaattcgcgtacaggacatccacgaagcagtcaaaaatgggcaactgtatctcttccaattatataataaggacttctcacctaaaagccatgggttgcctaatcttcacactctctattggaaagccgtgttcgatcctgagaacttgaaggaccctatcgtaaaacttaatggccaagctgagttattctatcggccgaaatccaacatgcaaatcatccaacataagaccggggaggagattgtgaacaaaaagctgaaggacggcaccccggttcctgatgatatctaccgcgaaatcagtgcttacgtccaggggaaatgtcaaggcaacttatccccggaggcagagaagtggctcccaagtgtcacaatcaagaaagccgcccatgatatcacaaaggatcgtcgctttaccgaagataagtttttctttcatgtccctattacactgaactatcagagttcaggcaagccgacggcattcaactcgcaagtaaacgatttcttgaccgagcaccctgagacaaatatcatcggcattgatcggggtgaacgtaacttgatttatgccgttgtaatcactccagatggcaagattctcgaacagaaatcttttaacgtgatccacgactttgattatcatgaatccctgtcccagcgggaaaaacagcgggtagcagcgcgtcaggcttggacagcgattggtcgcatcaaggatctcaaggaaggttacctgtcgcttgtggtgcacgaaattgctcaaatgatgatcaaataccaagcagtcgtcgtattagaaaacctcaacacgggctttaagcgtgtgcgcggtggtatcagtgagaaggccgtctaccaacagttcgaaaaaatgttgattgaaaaattgaacttcctggtatttaaagatcgggcaatcaatcaggaaggcggggttctcaaagcttaccagctgacagactcgtttacgtcttttgcaaagttaggtaaccagtccggtttcctgttctacatcccgtccgcctacaccagcaaaatcgaccctggtacgggcttcgtcgatccttttatctggtctcacgtgaccgcttctgaggaaaatcggaatgaatttttaaagggctttgatagcttgaaatatgacgcccaatcatccgcctttgtactgcatttcaagatgaaatccaataagcaatttcagaagaacaatgttgaaggtttcatgccggaatgggatatctgcttcgagaaaaacgaggaaaagatttccttgcagggtagtaagtatacagccggtaaacgcattattttcgactccaaaaagaagcaatacatggagtgcttcccgcagaatgagctcatgaaagcactgcaggacgtaggcatcacctggaacacgggcaacgatatctggcaggatgtccttaaacaagcgagcacagatacagggtttcgtcaccggatgatcaacctgatccgttcagtgctccagatgcggtccagtaatggtgcgaccggggaggattacatcaattcacctgtgatggatctggacggccgttttttcgacactcgggcggggattcgtgatctgccattggatgccgacgccaacggcgcataccacatcgctttaaaagggcgtatggtactcgaacgcattcgctcccaaaagaataccgcgattaagaacactgactggttatacgcaatccaagaggaacgtaacggcgcgccaaaaaggccggcggccacgaaaaaggccggccaggcaaaaaagaaaaaggctagcggcagcggcgccggatccccaaagaagaaaaggaaggttgaagaccccaagaaaaagaggaaggtgtgataa

SEQ ID NO: 791-805 - skipped (15 entries)

SEQ ID NO: 806 - protein, 10 aa, Artificial Sequence
  Description of Artificial Sequence: Synthetic peptide
YLFQIYNKDF

SEQ ID NO: 807 - skipped

SEQ ID NO: 808 - DNA, 3738 bp, Phocaeicola plebeius
atggaaacattttctgggtttacaaatttgtaccctttgtcaaagacattgcggtttagattgattcctgtaggggaaacattgaaacattttattgatagtggaatattggaagaagaccagcatagggctgagagttatgtgaaggtaaaggctattattgatgactatcatagagcttatattgagaattctttatcaggctttgaattacctttggaaagtacaggtaaattcaattctttggaggaatattatttgtatcataatattcgaaataaaacggaagaaattcagaacttgtcatccaaggtcagaactaatctgaggaaacaagtcgtggctcaactaactaagaacgaaatatttaaaagaattgataaaaaagagctgattcagagtgatttgattgattttgttaaaaatgagcctgatgcaaatgagaaaatagcactaatctcagaatttcgtaattttactgtatatttcaaaggttttcatgaaaaccgtagaaatatgtattcagatgaagaaaagtccacgtctatagcctttcgtctgattcatgagaatcttcccaagtttattgataatatggaagtgtttgcaaaaatacagaatacttctatctcggagaattttgatgctatacagaaagaactttgcccggagttggtaaccctttgtgaaatgtttaagttggggtattttaataagactttaagtcagaaacaaatagatgcttataatactgttataggtggtaaaaccacatcagaaggtaaaaagattaaaggtcttaatgaatatattaatctttataaccagcagcataagcaagagaaattacccaagatgaagcttcttttcaagcagatacttagtgatagagaaagtgcgtcatggctgccagagaagtttgagaatgatagtcaggttgtcggtgcaatagtgaatttctggaatactattcatgatacagttcttgcagaaggagggttgaaaacgattattgcttcattgggtagttatggccttgaaggtattttcctaaagaatgatttgcaacttactgatatatcacaaaaggcaacaggtagttggggtaaaatatcttctgagataaagcaaaaaatagaggtgatgaatcctcaaaagaaaaaagagtcttatgagacttatcaagaacgtatagataagatattcaagtcttataaaagtttttctttagcttttataaatgagtgccttcgtggtgagtataagattgaagattattttctcaagttaggggctgtgaatagcagttcgttacagaaagaaaatcatttttcgcatattctcaatacctatacagatgtgaaagaggtgattggcctttactctgaatcgactgacactaaattaatacaagataatgattccattcaaaagataaaacagttccttgacgcagttaaagacttacaggcttatgtaaaaccattattgggtaatggtgatgaaaccggtaaagatgaaagattttatggcgatttgattgagtattggagtttgcttgacttgattactcctttatataatatggttcgtaattatgtcactcagaagccgtattctgtagataaaataaaaataaatttccagaatcctactttattgaatggctgggaccttaataaagaaacggataatacatctgtaatattgcgtcgtgatggcaaatattatctggccataatgaataacaaatccagaaaagtctttttgaaatatccatcagggacagatagaaattgctatgagaagatggagtataaacttttaccaggtgctaataagatgctacctaaggtcttcttttcaaaatcaaggataaatgaattcatgcctaatgagcgtttgttgtcaaattatgaaaagggcacgcataaaaagtcgggtacttgttttagtttggatgattgtcatactttgatagatttctttaagaagtctttggacaaacatgaggattggaaaaactttggcttcaagttctctgatacttctacatatgaagatatgagtggtttttataaagaagtagagaatcaaggttataaattatcctttaagccgattgatgctacgtatgtggatcagcttgttgatgaaggtaagatttttctgtttcagatttataacaaggatttttctgagcatagcaaaggtacgcctaatatgcataccttgtattggaaaatgttgtttgatgaaacaaatcttggggatgtggtgtataaactaaatggtgaggctgaagtctttttccgtaaggcaagtataaatgtatcacatccaactcatccggctaacatacccataaagaaaaagaatcttaaacataaagatgaagaaagaattcttaaatatgacttgattaaagataagcgttataccgtcgaccagttccagtttcatgtgccaataaccatgaatttcaaggcggatggaaatggaaatataaaccagaaagcgatagactatttacgttcggcatcagatactcatataatagggattgaccgtggtgaacgaaacttgttatatcttgtagtgattgatggaaatggaaaaatctgtgagcaattctctttaaatgaaatagaagttgaatataatggtgaaaagtattcaacaaattaccatgatttgcttaatgtcaaggagaatgaaagaaagcaggcaagacagagttggcaaagtatagctaacataaaagacttgaaagaaggctatttaagtcaggttattcataagatttctgaattgatggtcaaatataatgcgattgtggtgcttgaggatttgaatgctggatttatgcgtggtcgacaaaaggttgaaaagcaggtttatcagaaatttgaaaagaaactcattgagaagttaaattatctcgtattcaagaaacagtcttctgatttgcctggtgggcttatgcatgcttatcagttagctaataaatttgagagttttaatactttaggtaaacaaagcggatttctcttttatatccccgcctggaataccagtaaaatggatccggtaacaggttttgtaaatttgtttgatgtgaagtatgaaagtgttgataaggcaaaaagctttttcagtaagttcgattctataaggtataatgtggaaagagatatgtttgaatggaaattcaattatggtgaattcacgaaaaaagccgaaggaactaaaactgattggactgtttgttcctacggtaatagaattatcacctttagaaatccggataaaaattctcaatgggataataaagaaataaatcttaccgaaaatattaagctgctgtttgaaaggtttggcatcgacttatcttcaaatctgaaagatgagataatgcaacgtacagaaaaagaattctttatcgaacttatatccctatttaagcttgtgctacagatgcgtaatagttggacaggtactgatatagattatctggtatcacctgtatgcaatgaaaacggtgaatttttcgatagcagaaacgtagatgaaacacttccgcaaaatgcggacgcaaacggagcatataacattgcaagaaaaggaatgatacttcttgataagattaagaaaagtaacggtgagaagaagcttgctctatctataactaatagagaatggctttcatttgctcaaggttgttgcaaaaatggatga

SEQ ID NO: 809-811 - skipped (3 entries)

SEQ ID NO: 812 - DNA, 3594 bp, Sulfurimonas crateris
atgttgtcaaattttacaaatcagtaccaactttcaaaaaccttgcgttttgaactcaaacctgtaggtgatacacttaagcatatagagaaaagtggcttgatagcacaagatgaaatacgctcacaagagtatcaagaagtaaaaacgattatcgataaataccacaaagcttttattgatgaagcacttcaaaatgttgtgcttagtaatcttgaagagtacgaagcactttttttcgagagaaatcgcgatgaaaaagcttttgaaaaattgcaagctgtattgcgtaaagagatagttgcacattttaagcaacaccctcaatacaaaacactttttaaaaaagagcttattaaagctgatttgaaaaattggcaagaactaagcgacgcagaaaaagagcttgtaagccactttgataacttcacaacctactttacaggttttcatgaaaatcgtgccaatatgtacacagatgaagcgaaacactcttctatcgcttaccgtattatccacgaaaatttgcctatttttttaacaaataaaaaactttttgaaacaatcaagcaaaaagcaccacaccttgcacaagaaacgcaagatgccttgcttgaatatttaagtggtgcaatagttgaagatatgtttgagcttagttattttaaccacctactttcacagactcatatcgatctatacaaccaaatgattggcggagtcaaacaagatagtttaaaaattcagggtttaaacgaaaaaatcaatctctatcgtcaagcaaacggcttgtcaaaacgtgaactgccaaatctcaaaccactacacaaacagatacttagtgatcgtgaaacactctcttggcttcctgaatcatttgaaagcgatgaggaacttatgcaaggtgtgcaagcatattttgagagtgaagtattagcttttgagtgctgcgatggtaaggtcaatcttttagagaaactgcctgagcttttgcaccaaacacaagattatgatttttcaaaagtttatttcaaaaacgatctagcacttacagctgcttcgcaagcgatttttaaagattatcgcattataaaagaagcactttgggaagtgaataaacctaaaaaatcaaaagatttagtggcggatgaagagaagttttttaacaagaaaaatagctattttagtattgagcaaatagatggtgccttaaatagtgcgcaactctccgctaacatgatgcactatttccaaagtgaatctacaaaggtaatcgagcaaattcaattgacttacaatgattggaagcgaaacagttcaaataaagaacttctaaaagcttttttagacgcgcttttatcgtatcaacgtcttttaaaaccgcttaatgctccaaacgatcttgaaaaagatgttgctttttatgcctacttcgatgcttattttacgagtttatgcggtgtagtcaagctttacgacaaagtaagaaactttatgaccaaaaagccgtattcacttgaaaaatttaaactcaattttgaaaactcgacactacttgatggttgggatgtcaataaagagtctgataatacggcaattttatttcgcaaagagggcttgtattatctaggtattatgaataaaaagtataacaaagtatttcgcaatatttctagttcacaagatgagggttaccaaaaaattgactataaactattaccaggtgcgaataaaatgcttccaaaagtctttttttctgataagaataaggaatattttaagccaaatgctaagttacttgagagatataaagcgggagagcataaaaaaggggataatttcgacttagatttttgtcacgaattaatagacttttttaaaacttcaatcgaaaaacatcaagattggaaacattttgcttatcagttttcaccgactgagagttacgaagatttaagcggtttttatagagaggttgaacagcaaggttataaaatcagttataaaaatattgcagcaagttttatcgatacattagttgcagaaggtaaactctattttttccagatctacaacaaagacttttctccctatagtaaaggtacgccaaatatgcacactctttattggcgtgcactttttgacgaaaagaatctagctgatgtgatctacaaacttaacgggcaagcggagatatttttccgtaaaaaatcgatcgagtactcccaagagaagctgcaaaaagggcatcaccacgaaatgcttaaagataagtttgcttatccaattatcaaagatcgtcgttttgcttttgataagttccagtttcatgtaccaataacgctcaactttaaagcagagggtaatgaaaacattacgccaaaaacatttgaatacattcgatctaatcccgacaacataaaagttataggtatagatcgtggtgagcgtcacttactctatctttcactcattgatgcagagggtaagatcgtagagcagtttacgctcaatcaaattattaatagctacaacgggaaagaccacgtcatagattatcatgccaaacttgacgcaaaagaaaaagaccgcgacaaagctcgaaaagagtggggaactgtcgaaaacatcaaagaactaaaagagggctatttaagccatgttatccataagatagcaactcttatcattgaacacggtgcagttgtagcgatggaagatctcaactttggctttaaacgtggacgtttcaaagttgaaaagcaagtctatcaaaaatttgaaaaagcacttatcgataagctgaactatcttgtcgataagaaaaaagagcctcataaacttggaggtcttttaaatgcgttgcaactcactagcaagtttcaaagttttgaaaaaatgggtaaacaaaacggctttttgttttatgtacctgcgtggaatacatccaaaatagatcctgttacgggttttgttaatctttttgatacccgttatgcaagtgtagaaaaatccaaagcattttttactaagtttcaatcaatttgctacaacgaagctaaagattacttcgagttagtatttgattataatgatttcacagaaaaagctaaagaaactcgaagcgagtggacactttgtacttatggtgaacgcattgtgagctttagaaacgcggagaaaaatcatcaatgggatagcaaaacaattcatcttacaacagagtttaaaaacctttttggtgagctgcatggtaatgatgtaaaagagtatattttagagcaaaattcagttgagttttttaagtcacttatctatttattaaaaattactttgcagatgcgtaactcaatcacgggtactgatatagactatcttgtctcacccgtcgcagatgaagcagggaatttttacgacagtcgtaaagccgatacatctttaccaaaagatgccgacgcaaacggtgcgtataatatcgctcgtaaaggtttaatgttgatgcatcgcatccaaaacgccgaagatctcaaaaaagtgaacttggcgatttcaaaccgtgactggctccgcaacgctcaaggactggataaatga

SEQ ID NO: 813-817 - skipped (5 entries)

SEQ ID NO: 818 - DNA, 3759 bp, Prevotella ruminicola
atgatcgacttaaaacaatttattggcatatatcctgtatcaaagaccttgcgctttgagttgagacctgttggtaagacacaagagtggatagaaaagaatagagttcttgaaggagatgaacagaaggccgcagattaccctgtggttaagaaacttatagatgattaccataaagtatgcattcacgactccttaaatcacgttcacttcgattgggagcctttgaaagatgctatcgaaattttccagaaaacaaagagtgacgaggctaagaaacgacttgaggcagagcaggctatgatgcgtaaaaagatagctgctgcaatcaaggactttaagcatttcaaggagttgacagcggcaactcccagcgatttgattacctctgttcttcctgaattcagcgatgatgggtcgttaaaatcctttcgcggttttgcaacctatttcagtgggttccaagagaatagaaataatatttatagtcaggaggctattagtacgggagtaccttatagactggttcatgataactttcctaagttcctttctgatttggaagtgtttgaaaggatcaagagcacttgtccagaagttatcaatcaggcatcagcagagttacagcccttcttagaaggagtgatgatagacgacattttctcgctcgacttctataattctctgttgactcagaatggtatagatttctttaatcaagtaataggcggcgtaagcgagaaggacaagcagaagtatcgtggtattaacgagttctcaaacctttatcgtcaacagcataaagaaattgcagcatcgaagaaggctatgacaatgataccattattcaagcagatattatctgatcgtgatactttatcttatattcctgctcagataagaacagaagacgaattggtatcttctatcactcagttctatgaccatatcacccatttcgagcatgatggaaaaaccatcaatgtgttatcagaaatagtggctctgttgggtaagttggatacttacgatcctaatggtatttgtataaccgcccgcaagttgacagatatttcacaaaaggtatatggaaagtggagtgttatcgaggaaaaaatgaaagagaaggctatccagcagtatggcgatatatctgtagccaagaataagaaaaaggtagatgcttttctttcgcgtaaggcctatagcttgtctgatttgtgctttgatgaagaaattagtttctcacgctattactctgaattaccccaaactttaaatgcaattagcggctattggctgcagtttaacgagtggtgtaagagtgatgaaaagcagaagttcctgaacaaccaaacaggcacggaggtggtgaaaagtcttttggatgccatgatggaattattccataagtgctctgtcctggtaatgccggaagagtacgaggtagacaagagtttctataatgaattcctccctctctatgaagaacttgatacgctcttcctgttatataacaaggtgagaaattatctcactcaaaagccatccgacgttaagaagtttaagttgaattttgagtcgccttcattggctagtggatgggaccagaataaggaaatgaagaataatgcgattcttcttttcaaagatggtaagtcgtatttaggcgtattaaatgcaaagaataaagccaagataaaagatgctaagggcgatgtgtcgtcttcttcctataaaaagatgatttacaagcttctatctgatccttcaaaggatttacctcataaaatattcgcaaaaggaaatcttgatttctacaagccttcagagtatattttagaaggaagagagttgggtaaatacaagaaaggtccaaactttgacaagaagttccttcatgactttatcgatttctacaaggccgcaattagtattgatccagattggagcaaattcaacttccagtattcccctacagaatcatacgatgatattggcatgttctttagcgaaatcaagaagcaggcttacaagattcgttttactgatatctcagaagctcaggtgaacgagtgggttgataatggccagttatatctgttccagctctataataaggactatgccgaaggtgcgcatggccgtaagaatctgcatacactctactgggagaatctgtttacagacgagaacctcagcaacctagtgcttaaattgaatggtcaggctgaattgttctgtcgtcctcaaagtatcaagaaacctgtttcacacaagattggttcgaagatgctgaatcgcagggataagagcggaatgcccataccagaatctatttatcgcagcctgtatcagtattataatggcaagaaaaaggaaagtgaactgacagttgctgaaaaacagtatatagatcaggtgattgtgaaggatgtcactcacgaaattatcaaagaccgcagatataccagacaggagtacttcttccatgtgccactgacattcaatgccaatgctgatggtaatgagtatatcaacgaacatgtactgaactatctgaaagataatcctgacgtaaatattataggtatcgaccgtggtgagcgtcatctgatttaccttacattgatcaatcagcgtggagaaattctaaagcagaagacttttaacgtggtgaatagctataactatcaggctaagttggaacaacgagaaaaggaacgtgatgaggctcgtaagagttgggatagtgtaggtaagataaaagacctgaaagagggtttcctctctgccgttatccatgagataaccaatatgatgattgaaaacaatgccatcgtggtgcttgaggacttgaatttcggattcaaacgtggacgcttcaaggtggagcgccaggtgtatcagaagtttgagaagatgctgattgataaactgaattatctgtcattcaaggatcgcgaggctggcgaagagggtggtatactcagaggctaccagatggcacagaagtttataagtttccagcgtcttggtaagcagagtggcttcttgttctacatcccagctgcttatacctcaaagatagatcctgtatcaggtttcgttaatcatttcaacttcagcgatatcactaatgccgagaagcgtaaggacttcttgatgaagatggatcgcattgagatgaagaatggaaatattgaatttacattcgactatcgcaagtttaagacattccagactgactatcagaacgtttggactgttagcactttcggaaagcgaattgtgatgcgaatagacgaaaaaggatataaaaagatggtagattacgaaccaacaaacgatattatcaaagcttttaagaataaaggcatcctgttgtcggaaggttctgatttaaaagctctgattgcagagattgaagccaacgcaactaatgccggcttctatagcacactgctctatgctttccaaaaaactctgcagatgcgtaatagtaatgctgtaacggaagaagattatatcctctctcctgtagctaaagatggacatcaattctgtagtactgatgaggcaaacaagggcaaagatgctcaaggcaactgggtatcaaaactgcctgtagatgctgatgctaatggtgcatatcacatcgctttaaagggactttatttgctcagaaatcctgaaacaaagaaaatagaaaacgaaaaatggctccagtttatggttgagaaaccgtatttggagtaa

SEQ ID NO: 819-821 - skipped (3 entries)

SEQ ID NO: 822 - DNA, 3864 bp, Clostridium sp.
atgtcgtataatagagaaaaaatggaggagaaagaattgggtaaaaatcaaaattttcaggaatttattggggtatcaccacttcaaaagactttaagaaacgaattgatcccaacagaaacaacaaagaagaatattgctcagcttgatcttttgactgaggatgaagtgcgtgcgcaaaatcgagagaagctgaaagaaatgatggatgactactaccgggatgtgattgatagtacgttacggggggaattattgattgattggagctatttattttcgtgcatgcgaaaccatctaagtgagaattccaaagagtcaaaacgggaattggaacgaacacaggattctgttcgttcacaaatccatgataagtttgctgaacgagcggattttaaggatatgtttggagcatcgataataacaaaattacttccgacatatataaagcaaaattcaaaatattccgagcggtatgacgagagcgtgaaaattatgaaactgtatggaaaattcacaacatcgttgaccgattactttgagacaagaaagaatatcttttctaaagagaaaatatcctctgccgttggatatcgaatcgtagaggaaaatgctgagattttcctgcagaatcagaatgcttacgacagaatctgtaagatagcgggactggatttacatggattggataatgaaataacagcatatgttgatggaaaaacattaaaagaagtatgttccgatgaaggatttgcaaaggtgattacacaaggagggattgatcgctacaacgaggcaattggtgcggtaaatcaatatatgaatctgttatgccagaagaataaggcattaaaaccgggacaatttaagatgaagcggctacataaacagattctttgcaaaggaacaacctctttcgatattccaaagaagtttgaaaatgataaacaggtgtatgacgcagttaattcttttacagagatagtaacgaagaataatgatttgaagcgactgttaaatattacacagaatgcaaatgattatgacatgaataaaatctatgtagtagccgatgcatatagtatgatttcacagtttatcagtaaaaaatggaatctgattgaagaatgcttgctggattattatagcgataatttgccgggaaaaggaaatgcgaaagaaaacaaagttaaaaaggcggtaaaggaagaaacgtatcgcagtgtttcacagttgaatgaagttattgagaaatattatgtggaaaagaccggacagtcagtatggaaagtggaaagttatatttctagtctggcagaaatgattaagctggaattgtgccacgagatagataacgatgagaagcataatctgattgaagatgatgagaagatatccgagattaaggaactgttggatatgtacatggatgtatttcatattataaaagtgttccgggtgaatgaagtattgaatttcgatgaaaccttttattcggagatggatgagatctatcaggatatgcaggaaatcgttccattatacaatcatgttcgaaactatgttacacagaaaccatataagcaggagaaatatcgtttatatttccacactccaacattggcaaatggctggtccaagagtaaggaatatgacaacaacgcaattatattggtgcgagaagataaatattatttaggtattctgaatgcgaaaaagaaaccatcgaaagaaattatggcgggcaaagaggattgttcagaacatgcatatgcaaagatgaattattatttgttgccgggcgcgaacaagatgcttccaaaagtatttttatctaagaaaggaatacaggactatcacccatcatcatatattgttgaaggatataatgaaaagaaacatattaaaggttccaagaattttgatatccggttttgtagggatttgattgactacttcaaggaatgcattaaaaaacatccggattggaataagtttaactttgaattttctgcgacagaaacatatgaggatatcagtgtcttttatcgcgaagttgaaaagcaaggatatcgcgtagagtggacgtatatcaatagtgaagatattcagaaactggaagaagatggacagttgtttttatttcagatatataacaaagattttgctgtgggaagtacaggtaaaccaaatcttcatacattgtatctgaaaaatctgttcagcgaagaaaatttgcgggacattgtattaaaactaaatggggaagcagaaatattcttccgtaaatcaagtgttcaaaaaccggtgattcataagtgcggcagtattttagtcaatcgtacctatgagattaccgagagtggaacaacacgggtacaatcaattccggaaagtgaatacatggaattatatcgctactttaatagtgaaaagcagatagaattatcagatgaggcaaaaaaatatttggacaaggtgcaatgtaataaggcaaagacagatattgtgaaagactaccgatacaccatggacaagttttttattcatcttccgattacgattaattttaaggttgataagggtaacaatgttaatgccattgcacagcaatatattgcagagcaggaagatttgcatgtgataggaatcgatagaggagaacggaatctgatttacgtttctgtaattgacatgtatggcagaattttagagcagaaatcctttaaccttgtggaacaggtatcgtcgcagggaacgaagcgatattacgattacaaagaaaaattacagaaccgggaagaggaacgggataaagcaagaaagagttggaagacaatcggcaagattaaggaattaaaagaggggtatctgtcgtcagtaattcatgagattgcacagatggtcgtaaagtataacgcaatcattgcaatggaagatttgaattatggatttaagcggggaagattcaaagtagagcgccaggtatatcagaaatttgaaacgatgttgatcagtaagttgaattatctggcagataaatctcaggctgtggatgaaccgggaggtatattacggggatatcagatgacttatgtgccggataatattaagaatgttggaagacaatgtggaataatcttttatgtgccggcagcatatacctccaagattgatccgacaaccggatttatcaatgcatttaagcgggatgtggtatcaacaaatgatgcaaaagagaatttcttgatgaagtttgattctattcagtacgatatagaaaaaggcttatttaagttttcatttgattacaaaaattttgccacacataaacttacacttgcgaagacaaaatgggacgtatatacaaatggaactcgaatacaaaacatgaaagttgaaggacattggctttcaatggaagttgaacttacaacgaaaatgaaagagttgctggatgactcgcatattccatatgaagaaggacagaatatattggatgatttgcgggagatgaaagatataacaaccattgtgaatggtatattggaaatcttctggttgacagtccagcttcggaatagcaggatagataatccggattacgatagaattatctcaccggtactgaataatgatggagaattttttgattctgatgaatataattcatatattgatgcgcaaaaggcaccgttaccgatagatgccgatgcaaatggcgcattttgcattgcattaaaaggaatgtatactgccaatcagatcaaagaaaactgggttgaaggggagaaacttccggcggattgcttgaagatcgaacatgcgagttggttagcatttatgcaaggagaaaggggatag

SEQ ID NO: 823-825 - skipped (3 entries)

SEQ ID NO: 826 - DNA, 3888 bp, Limihaloglobus sulfuriphilus
atgagtgcagtatttaaaatcaaggagagtaccatgaaggactttacacatcagtattcactgagcaagacattgaggtttgagctcaaacccgtcggagaaacggcagagaggatcgaggatttcaaaaatcaggggctcaaaagtattgttgaagaagaccgccaacgagcagaagattataaaaagatgaaaaggattctcgacgattatcacaaagaatttatcgaagaggtgctcaatgacgacatcttcaccgcaaacgaaatggaatctgctttcgaagtgtaccgcaaatatatggcgagtaaaaatgatgataagctgaaaaaagaaatcaccgaaatttttacagatttaagaaagaaaatcgcaaaggcttttgagaataagagcaaagaatattgtctttacaaaggcgacttcagcaaactgataaacgaaaagaagaccggaaaagacaaagggccgggaaaactctggtactggcttaaagctaaggcagatgcaggagttaacgaattcggagacggccaaacttttgaacaagccgaagaagccttagccaaattcaataatttcagcacctatttcaccggattcaaccagaatcgtgacaatatctacacggatgctgaacagcaaaccgctatcagctacagagtaataaacgaaaatatgaccagatattttgacaactgcattcgatactccagtattgaaaacaaatatccggaactcgtaaaacagcttgagccgcttagcggcaaattcgcccccggaaactataaagattatctaagccagactgccatcgatatttacaacgaagctgtcggccataagtctgatgacataaacgcaaagggtatcaaccagttcatcaatgaataccgacagagaaacagcataaagggccgcgagctgccgattatgtccgtactctacaaacagatattaagcgatattaataaagatctcattatcgacaagttcgagaacgccggcgagcttttggatgctgtaaaaacactccacagagaattaactgataaaaagattttgctcaagattaaacaaactcttaacgaatttctcacagaagacaattcggaggatatttacatcaaaagcggcaccgatcttacagcagtttcaaacgctatatggggcgagtggtctgttattcctaaagcactcgaaatgtacgccgaaaacataactgacatgaatgctaaagccagagaaaaatggctgaaacgagaagcctaccatttgaaaaccgtacaggaagcgatagaagcgtacctgaaagataacgaagaatttgaaacccggaatatatcagaatatttcacaaattttaaatccggcgaaaacgaccttattcaagttgtccaaagtgcttacgcgaaaatggaatcgattttcggtatagaggattttcacaaagacaggcgtcccgtcacagaaagcggcgagcccggagaaggtttcagacaggtagaacttgttcgggagtatcttgacagcctgataaacgtagaacactttataaaaccgctgcacatgttcagaagcggtaagccgattgagctggaagactgcaacagcaacttctacgatcctttgaatgaggcatataaggaactcgatgttgtattcggcatatacaacaaagtaagaaattacgttacccaaaaaccctattcaaaggataaatttaaaatcaattttcaaaacagcacccttctcgacggctgggatgtaaacaaagaatcagccaacagctctgttttgctgttaaaaaatggcaaatattaccttggtgtaatgaagcagggcgcaagcaatatcctcaattaccgcccagagccgagcgatagcaaaaacaaaataaacgccaaaaaacagctttcagaaatagcacttgcaggggcaacggatgattattacgagaaaatgatatataaactgttgcctgaccctgctaaaatgctgccaaaagtgtttttcagcgccaaaaacattgaattttacaacccttcccaggaaataatatatatcagggaaaatgggcttttcaagaaagacgccggcgataaagagtcccttaaaaagtggatcggtttcatgaaaacatcgcttttaaaacaccctgaatggggtagttactttaactttgaatttgagcccgctgaagattatcaggatatcagtattttttacaaacaagttgcagagcagggctactctgttacttttgacaaaataaaaacaagttacatagaagaaaaggttgccagtggagagctgtatctctttgaaatatataataaggatttttctccacacagcaagggacggcccaatctgcatacaatgtactggaaaagtctttttgaaaaagagaatctccaaaatctcgtaactaaactcaacggcgaggcggaggtcttcttccggcagcattccataaagagaaacgagaaggtggttcacagagccaaccggccgatacaaaacaaaaaccccctcaccgaaaagaaacaaagcatctttgaatacgacctcgtgaaagaccgccggtttacaaaggataaattttttctgcattgccctattacgctgaacttcaaagaggccggacccggcaggttcaacgacaaagtcaacaaatatatcgccggcaatccggacatcaggataataggcattgacagaggagagaggcacctgctctattacagcctcatagaccagagcggcagaatcgtggagcagggcacacttaaccagataaccagtaccctcaacagcggcggcagggaaatacccaaaaccaccgattaccgcggcctgcttgatacaaaagaaaaagaacgggacaaggcgagaaaatcatggtcaatgattgaaaacattaaagagctcaaaagcggctatctctcgcatattgtccataaactcgctaaactgatggttaagaataatgcagttgtggtgcttgaggatcttaatttcgggttcaaacgcggccgattcaaggttgaaaaacaggtttaccagaaatttgaaaaggccctcatagaaaagctgaactatcttgttttcaaagacgcccggcccgcagagccggggcattatctcaacgcataccagcttaccgcacctcttgaaagttttaaaaagctcggcaaacagagcggatttatatactatgtgccggcgtggaacacctcaaagattgaccctgttaccggttttgtaaatcagttttacatcgaaaagaactcaatgcagtaccttaaaaacttttttggtaaattcgattcgataaggtttaacccggataaaaattacttcgagtttggatttgactacaaaaactttcataacaaggccgccaaaagcaaatggactatctgcacccatggagacaaacgctcatggtacaaccgtaaacagagaaaactggagattcacaatgtaacagaaaatctggcaagcctgctcagcggcaaaggcataaatttcgctgacggcggcagtatcaaagacaaaatactatccgtagatgatgcgtctttctttaaaagccttgcatttaattttaaactcaccgcccagcttaggcacacattcgaggataacggcgaggagatcgactgcattatctcacctgtcgcggcggctgacggtacattcttctgttctgaaacggcaaaaaaacttaacatggaattaccccatgacgccgacgcaaacggtgcttataatattgcccgtaagggtcttatggttctaaggcagatacgcgaaagcggcaagcccaagccaatctcaaacgccgattggttagacttcgcccagcagaatgaagattga

SEQ ID NO: 827-829 - skipped (3 entries)

SEQ ID NO: 830 - DNA, 3738 bp, Ruminococcus bromii
atgcaagagcgtaaaaaaatatcgcatcttacacacagaaattcagttcaaaaaacaattaggatgcaactgaatcctgtaggtaaaacaatggattattttcaagcaaagcaaattcttgaaaatgatgaaaagcttaaagagaactatcagaaaatcaaggaaatagcagacaggttttacagaaatttaaatgaggatgtactttcaaaaaccgggttagataaattaaaagattatgctgaaatttactatcactgtaatacggatgcagaacgaaaaagacttgacgaatgtgcatcggaattaaggaaagaaatcgtcaaaaattttaagaatcgagatgagtataacaaactattcaataaaaagatgattgagatagttcttccccagcatcttaaaaatgaggacgaaaaggaagttgtagcctcatttaaaaatttcacaacatactttacaggtttcttcactaacagaaaaaatatgtattcggacggagaagaatccacggcaatcgcatatagatgcattaacgaaaatttgcctaagcatcttgacaatgtcaaggcctttgaaaaagcaatttctaaactatccaaaaacgcaattgatgatttagatgccacttattccggcttatgcggtacaaatttgtatgatgtttttacagttgattattttaactttttgcttccacaatccggaattaccgaatataacaaaatcatcggcggttacacaacaagcgacggtacaaaagttaagggtattaacgaatatataaatttgtacaatcaacaagtatccaaacgggataaaattcctaatcttaaaattttgtataaacaaattttaagtgagagtgaaaaggtatcattcataccgccaaagtttgaagatgacaacgaacttttatcggctgtttcagagttttacgcaaacgacgaaacctttgacgggatgccattaaaaaaagcaattgatgaaacaaagctattattcggcaatttagataattcctctcttaatggaatttacattcaaaatgaccgatccgtgacaaatctgtcaaacagcatgttcggttcttggtcagtaatagaagatttatggaacaaaaattatgactccgttaattcaaacagcagaatcaaagatattcaaaagcgtgaagacaaaagaaaaaaagcatacaaagcagaaaagaaactttcactttcatttttacaggttttgatttccaattctgaaaatgatgaaatcagagaaaagtctatcgtaaattactacaagacttctttaatgcaacttaccgacaatttgtcagacaaatacaacgaagcagcacctctgctcaacaaaagttacgctaatgaaaaaggtttgaaaaatgacgataaatctatttcattaattaaaaattttcttgatgccataaaagaaattgaaaaattcatcaagcctttgtccgaaactaatattacaggtgagaaaaatgatttgttttacagtcagttcacaccattacttgataatatcagcagaatagacatattatatgataaggtcagaaactacgttacacaaaaaccgttttcaaccgataaaatcaagcttaactttggcaattcacagctattaaacggctgggatcgaaacaaagaaaaagactgcggtgccgtttggctttgtagggatgaaaagtattatcttgcaatcatagataaaagtaataatagtattttggaaaatattgattttcaagactgcgatgaaaacgattgttacgaaaagataatttacaagcttctccccggtccaaataaaatgcttccaaaagttttcttttcagaaaagtgcaagaaacttttgtcaccgtcagacgaaatacttaaaattcgtaaaaacggcactttcaaaaaaggtgataagttcagccttgatgattgccataagttaattgatttctacaaagaatcattcaaaaagtacccaaattggttaatttataactttaaatttaaaaacacaaacgaatataacgatatccgcgaattttataatgatgttgcttcacagggatataatatttcaaaaatgaaaatcccgacatcatttattgacaaacttgtagatgaaggaaaaatctatcttttccaactctacaacaaagacttttcaccgcatagcaaaggtactcctaatctgcatacactttattttaaaatgttgtttgatgaaagaaatcttgaagatgtggtgtacaagcttaacggtgaggcagaaatgttttatcgtcctgcaagtataaaatatgacaaaccaactcatcccaaaaacacaccgataaaaaataaaaatacactcaatgataaaaaaacaagcacttttccttatgacttaattaaagataaacgctacactaagtggcagttttcacttcacttccctattaccatgaattttaaagctccggatagggcaatgatcaatgatgatgtcagaaatctgctgaaatcctgcaacaacaatttcatcataggaattgacagaggcgaaagaaacttgctttatgtcagcgtaattgacagcaacggtgctataatataccagcactcactcaatattatcggaaacaagtttaaaggaaaaacatacgaaactaactaccgggaaaaacttgcaacaagagaaaaagagcgtacggaacagcgccgtaactggaaagcaattgagagtataaaagaactcaaagagggctatatcagtcaggctgtgcatgttatatgtcagcttgttgtcaagtacgatgcaatcatcgttatggaaaagctgactgacggattcaaacgaggcagaacaaagtttgaaaaacaggtttatcagaaatttgaaaaaatgctgattgacaaactgaattactatgttgacaaaaagcttgatccagacgaaggaggcggtttacttcatgcctaccagcttacgaacaagcttgagagctttgataaacttggcatgcaaagcggttttattttctatgttcgtcctgattttacaagcaaaattgatcccgttaccggctttgtaaatttgttgtatcctcgatatgaaaacattgacaaagccaaagatatgatttcaagatttgacgatataggatacaatgccggcgaggacttttttgaatttgacattgattacgataagtttccaaagactgcgtctgactatcgcaagaggtggacaatctgtactaacggcgaaaggattgaagctttcagaaatcccgcaaagaataacgaatggagttatcgtacaataattcttgcagaaaaattcaaagaattatttgataacaattctataaattatcgtgattctgacgatttgaaagctgaaattctttcacagacaaagggcaaattttttgaggatttcttcaaattattaagacttaccctacagatgcgaaacagtaaccctgaaacaggcgaggaccgtattctttctcccgtcaaggacaaaaacggcaatttttacgacagttcaaaatatgatgaaaagagcaagcttccgtgtgatgccgatgcaaacggtgcgtacaacattgcccgcaaaggtttgtggattgttgaacaattcaaaaaatccgataatgtttcaactgtcggaccggtaatccacaatgacaaatggctgaaatttgttcaggagaatgatatggcgaataattaa

SEQ ID NO: 831-833 - skipped (3 entries)

SEQ ID NO: 834 - DNA, 3846 bp, Prevotella sp.
gtgaacattttaaaagagaattatatgaaagaaattaaagaactaacaggcttgtattctttaactaagactattggggtagaattaaagccagtgggtaagacgcaagagctcattgaagctaaaaagcttattgagcaggatgatcagcgtgccgaagattacaaaatagtaaaggatattattgatcgttatcataaggattttatcgataagtgtcttaactgtgttaaaatcaaaaaagatgatttggagaaatatgtgtcattggcagaaaactctaatagagatgctgaggattttgacaaaatcaagaccaaaatgcgtaatcagataactgaagctttcagaaagaattctttatttactaatttattcaagaaaaatcttattaaggagtatcttcctgcttttgtaagtgaggaagagaagagtgtggtgaacaaatttagcaaatttaccacttactttgatgcgtttaatgacaatcgtaaaaatttatattcaggcgatgccaaatccggtacgatagcttatcgacttattcatgagaatttgccgatgtttcttgataatatagcatcctttaatgcaatttctgggataggagtaaatgagtacttttctagtatagagacagaatttactgatactcttgaaggaaagcgtctgactgagttttttcagattgacttttttaataatacattgactcagaaaaagataggcaactataactatattgtaggggcagtcaataaagctgtaaatctttataagcaacagcacaaaacagttcgtgttccattgctcaaaccattatataaaatgatcttgagtgatagagttactccgtcatggttacctgaacgttttgaaagtgatgaagagatgctgactgccatcaaagctgcttacgaatctttgagagaagttttagtaggtgataatgatgaaagtcttcgcaacttattgctcaatatagagcattatgatcttgaacatatttacattgcaaatgattccggattgacttccatttcacagaaaatatttggatgttatgatacttatactttggcaatcaaagaccaactacaaagggattatcctgcaacaaagaagcaaagagaagctcctgatttgtatgatgaacgtatagataaattgtataaaaaggtgggtagtttttctattgcttatcttaatcggttagtcgatgcgaaagggcattttactattaatgaatattataagcagttgggagcttattgtcgtgaagaaggaaaagaaaaagatgatttctttaagcgtattgatggtgcttattgtgctatatcacatcttttctttggggaacatggcgaaatagcccagtcagactcagatgttgagcttatccaaaagttgctcgaagcctataaggggttacaacgctttatcaagcctttattaggtcatggtgatgaagctgataaagacaatgagtttgatgcaaaacttcgtaaagtatgggatgaactcgacatcattacaccgctttatgataaagtacgcaattggctctctcgtaagatatataaccctgagaaaataaagctatgttttgagaataatggcaagttgttatctggatgggttgacagcagaactaaatccgataatggtactcaatatggagggtatatctttagaaagaagaatgaaattggtgaatacgatttctatttgggtatttctgctgatacaaaactgtttcgtcgtgatgctgccatcagttatgatgatggcatgtacgagagattagattattatcagctgaaatcaaaaactttactcggaaatagttatgttggagattatggactggattcgatgaatttgctttctgcatttaaaaatgctgcagttaagttccaatttgaaaaggaagtggttcctaaagataaagagaatgtgccaaaatatctcaagcgcctaaaactggattatgcaggattttatcaaattttgatgaatgatgataaggttgttgatgcttacaagattatgaagcagcatattcttgcgacattgacttcttcgattcgtgtacctgcggcaatagagttagctactcaaaaagaattgggtattgacgaattgattgatgaaataatgaatttaccgtccaagtcattcggctatttccctattgtcactgcagcaatagaagaagctaacaagagagagaataaacctttgtttctttttaagatgagtaacaaggatctttcttatgcagcaacagcttctaaagggttaagaaaaggtcgaggaacagagaatcttcattcaatgtatctcaaagctcttctggggatgacacagagtgtttttgatatcggaagtggaatggtattctttcgtcaccaaactaaaggtttggcagaaacaacggcaagacataaagctaatgagtttgttgctaataagaacaagcttaatgacaagaaaaagagtatttttggctatgagatagtgaagaataaacgttttacggtagataagtacctttttaagttgtctatgaatttgaattattcgcaaccaaataacaataaaattgatgtaaattctaaagttcgtgaaataattagtaatggaggtataaagaatattattggcatagatcgtggtgaacgtaatttactttatctgtctttaatagatctgaagggaaatattgtcatgcagaagtctctcaatattctcaaggatgatcataatgcaaaggaaactgattataaaggtttgctgacagaacgagaaggagaaaataaagaagctcgccgcaattggaagaagatagcgaatatcaaagatttaaaacgaggttatttaagtcaggtagtacatatcattagtaaaatgatggtagaatacaatgcaattgttgtacttgaagatttaaatccaggttttatcagaggcagacaaaaaatcgagcgtaacgtatatgaacaattcgaaagaatgctaattgacaagttgaatttttatgttgacaagcataaaggtgccaatgaaacgggaggtttgttgcatgcacttcagcttacttctgaatttaaaaatttcaagaaaagtgagcatcagaatgggtgtcttttctatattcctgcatggaatactagcaaaatagatcctgcaacaggttttgtcaatctctttaatacgaaatatacgaatgcagttgaggcgcaggagttctttagtaaatttgacgagattcgttacaacgaggagaaagattggtttgagtttgaatttgattacgataaattcactcagaaggcgcatggtacacgtactaagtggacgctctgtacttatggtatgcgtttgcgttcatttaaaaattctgcaaaacaatataattgggattcagaggtagtagcgcttaccgaagaattcaaaagaatacttggagaagcaggtattgatattcatgagaatctaaaagatgcaatctgtaatttggaaggtaaaagccagaagtatctcgaacctttgatgcagtttatgaaattgctgctacaattgcgtaatagtaaggctggtactgacgaagattatatcctttctccagttgctgatgagaatggaatattctacgatagccgttcttgtggtgatcaacttccggagaatgcggatgctaatggtgcttacaacatcgctcgcaagggactgatgctgattgagcaaatcaagaatgcagaggatttgaataacgtcaagtttgatatatccaataaggcttggctcaattttgcacaacaaaagccatataagaatggatga

SEQ ID NO: 835-837 - skipped (3 entries)

SEQ ID NO: 838 - DNA, 3882 bp, Unknown
  Description of Unknown: Parcubacteria group bacterium Gr01-1014_33 sequence
atggcaaaagagaatatttttaatgagctcacaggaaaataccagctttcaaaaacgttgagattggagttgaagccagtggggaacactcagcagatgcttaaagatgaagatgtctttgaaaaagatagaattatcagggagaagtatagagagacaaggccgcattttgatcgtttacatagagagtttattgaacaggcgcttaaaaatcagaaactttctgatttaggaaagtattttcaatgtctcgcaaaactccaaaacaataaaaaggataaagaagcgcaggaggaatttaaaaggatttctcaaaatttaagaaaagaagtcaatgatctatttaaaatagatccgctgtttggggaaggagtctttgctttgctaaaagaaaaatatggcgaaaaagacgatgctttcttaagggagcaagatggtcagtatgttcttgatgaaaataaaaagaagatatcaatctttgattcatggaagggatttacggggtatttcacaaaatttcaagagacaagaaaaaatttctacaaagatgatggtactgcgacggcagttgccacaaggatcatagaccaaaatctgaaaagattttgcgagaatattcaaatatttaaatccatacaaaaaaaagttgattttaaagaagttgaagataatttttcggtagatttagaagatatcttttctcttggtttttatagttcttgttttctccaggaaggaattgatgtgtataacaaaattctaggaggtgaaccaaaaacaacaggtgaaaaattaaggggattgaatgaattgataaacagatatcgccaggaccataagggcgaaaaattgccgtttttcaagatgcttgataaacagattttaagcgagaaagaaaaattcattgaaagtatagaagacgacgaagaacttttaaaaactctaaaggaattttattcttctgcggaagaaaagactacagtattaaaagagcttttcaatgactttattaaaaacaatgagaactatgatctttccgaaatctatatttccagagaagcactcaatactatttcgcaccgttgggtaagtgccgctacgctacctgaatttgaaaaaagtgtttacgaagtgatgaaaaaggacaaaccatcagggcttagttttgacaaggacgataactcttataaatttcctgattttatcgcgctctcttatataaagggatcgtttgaaaaattatccggagaaaagctatggaaagatggatattttagagacgaaacaagaaatggtgataaaggttttttgatcggcaatgaatccctttggactcaattcataaaaatatttgagtttgaatttaattctttatttgaggcaaaaaataccgaaagatccgttggttattatcatttcaaaaaagattttgaaaaaataatcaccaatgatttttctgtaaatccggaagataaagtaattatcagagaatttgccgataatgtgctggccatttatcaaatggcaaagtactttgccattgaaaagaaacggaaatggatggatcaatacgatacgggtgatttctacaatcatcctgactttggatacaagacaaaattttatgacaatgcctacgaaaagatagtaaaggcgagaatgttactgcaaagttatctcactaaaaaaccatttagcacggataagtggaagttaaattttgaatgcggatatcttcttaatggatggtcttcaagttttaacacctatggttcgcttttatttagaacgggcaatgaatactatttgggagttgtgaatggtagtgccttgcgaacagagaaaatcaagagactaacaggcaatataacggaggcaaattcttgtcataaaatggtttatgattttcaaaaaccggacaataaaaatgtaccaagaatatttattagatcaaagggtgataaatttgcaccagcggtctccgagttgaatcttcctgttgattcaatattagaaatatacgataagggtttgtttaaaacagaaaataaaaatagtccgttttttaagccatcacttaaaaagcttattgattacttcaaattgggattcagtcgccatgcatcctataagcactatcagtttaaatggaaggatagttctgaatataaaaatatatctgaattttataatgataccattcggtcttgctatcagatcaagtgggaggagttaaattttgaagaagttaaaaaacttaccaactcaaaagacttattcttattccaaatatataataaagatttttccgaaaaaagtactggaaataagaatcttcattccatttattttgatggtctattcttggataataatatcaatgcgcaagacggagtgatccttaaattaagtggtggcggagagatttttttccgaccaaagacagatgtcaagaaacttggtagcaggactgatactaaaggaaagcttgttataaaaaataagagatatagtcaagataaaatctttttacattttcctattgagctaaactattctaatactcaagagagtaattttaacaaattagtaagaaatttcctcgccgataatcctgatataaatattatcggtgttgatcgtggagagaaacatttgatttactacgcgggaattgatcaaaaaggaaataccttaaaagataaagacgataaagatgttttggggagcttgaatgagatcaatggcgtaaattactataagttattggaagaaagggcaaaggcgcgggaaaaggcccggcaggactggcagaatattcaaggcattaaagatttaaaaatgggctatatttctcttgtggtgagaaaattagctgatttgattattgagtataatgctattctcgtgcttgaagacttgaatatgcgatttaagcaaattcacggcgggattgaaaagagcgtgtatcaacagcttgaaaaagcgctcattgaaaaattaaatttcttagttaataaaggcgagaaagatccagagagggcggggcatttgctccgtgcgtatcagctgaccgcaccgtttagtacgtttaaggatatgggcaaacaaaccggcgtgctgttctacacgcaagccagctacacatcaaaaacgtgccctcaatgcggttttcgtccgaatattaaattgcattttgataatcttgagaacgcaaagaaaatgcttgagaagataaatattgtctacaaagataatcactttgaaattggctataaagttagtgatttcaccaagacagaaaagacaagtagagggaatatactatatggagacaggcagggcaaagacacctttgttatttcttctaaagcggcaatccgttataaatggtttgccagaaatataaaaaacaatgaactgaatagaggagaaagcttgaaagagcatacagaaaaaggagtaacaattcaatacgatattaccgaatgtttaaaaattctctatgagaaaaatgggatagatcattccggcgatataacaaaacaatcaatacggagtgaattgccagcaaaattttataaagatttactattctatttgtatttattgacgaatacaagaagcagtatctctggcacagaaatagattacataaattgccctgattgcggttttcatagcgagaaaggtttcaatggatgtatatttaatggagatgcaaatggtgcatacaatattgccagaaaaggtatgttaatactaaaaaagataaatcagtacaaagatcaacatcacacaatggacaagatggggtggggcgatttatttatcggtatagaggagtgggataaatatacgcaggttgtgtcaagatcataa

SEQ ID NO: 839-841 - skipped (3 entries)

SEQ ID NO: 842 - DNA, 3822 bp, Prevotella sp.
atgaaagaaattaaagaactaacaggcttgtattctttaactaagactattggggtagaattaaagccagtgggtaagacgcaagagctcattgaagctaaaaagcttattgagcaggatgatcagcgtgccgaagattacaaaatagtaaaggatattattgatcgttatcataaggattttatcgataagtgtcttaactgtgttaaaatcaaaaaagatgatttggagaaatatgtgtcattggcagaaaactctaatagagatgctgaggattttgacaaaatcaagaccaaaatgcgtaatcagataactgaagctttcagaaagaattctttatttactaatttattcaagaaaaatcttattaaggagtatcttcctgcttttgtaagtgaggaagagaagagtgtggtgaacaaatttagcaaatttaccacttactttgatgcgtttaatgacaatcgtaaaaatttatattcaggcgatgccaaatccggtacgatagcttatcgacttattcatgagaatttgccgatgtttcttgataatatagcatcctttaatgcaatttctgggataggagtaaatgagtacttttctagtatagagacagaatttactgatactcttgaaggaaagcgtctgactgagttttttcagattgacttttttaataatacattgactcagaaaaagataggcaactataactatattgtaggggcagtcaataaagctgtaaatctttataagcaacagcacaaaacagttcgtgttccattgctcaaaccattatataaaatgatcttgagtgatagagttactccgtcatggttacctgaacgttttgaaagtgatgaagagatgctgactgccatcaaagctgcttacgaatctttgagagaagttttagtaggtgataatgatgaaagtcttcgcaacttattgctcaatatagagcattatgatcttgaacatatttacattgcaaatgattccggattgacttccatttcacagaaaatatttggatgttatgatacttatactttggcaatcaaagaccaactacaaagggattatcctgcaacaaagaagcaaagagaagctcctgatttgtatgatgaacgtatagataaattgtataaaaaggtgggtagtttttctattgcttatcttaatcggttagtcgatgcgaaagggcattttactattaatgaatattataagcagttgggagcttattgtcgtgaagaaggaaaagaaaaagatgatttctttaagcgtattgatggtgcttattgtgctatatcacatcttttctttggggaacatggcgaaatagcccagtcagactcagatgttgagcttatccaaaagttgctcgaagcctataaggggttacaacgctttatcaagcctttattaggtcatggtgatgaagctgataaagacaatgagtttgatgcaaaacttcgtaaagtatgggatgaactcgacatcattacaccgctttatgataaagtacgcaattggctctctcgtaagatatataaccctgagaaaataaagctatgttttgagaataatggcaagttgttatctggatgggttgacagcagaactaaatccgataatggtactcaatatggagggtatatctttagaaagaagaatgaaattggtgaatacgatttctatttgggtatttctgctgatacaaaactgtttcgtcgtgatgctgccatcagttatgatgatggcatgtacgagagattagattattatcagctgaaatcaaaaactttactcggaaatagttatgttggagattatggactggattcgatgaatttgctttctgcatttaaaaatgctgcagttaagttccaatttgaaaaggaagtggttcctaaagataaagagaatgtgccaaaatatctcaagcgcctaaaactggattatgcaggattttatcaaattttgatgaatgatgataaggttgttgatgcttacaagattatgaagcagcatattcttgcgacattgacttcttcgattcgtgtacctgcggcaatagagttagctactcaaaaagaattgggtattgacgaattgattgatgaaataatgaatttaccgtccaagtcattcggctatttccctattgtcactgcagcaatagaagaagctaacaagagagagaataaacctttgtttctttttaagatgagtaacaaggatctttcttatgcagcaacagcttctaaagggttaagaaaaggtcgaggaacagagaatcttcattcaatgtatctcaaagctcttctggggatgacacagagtgtttttgatatcggaagtggaatggtattctttcgtcaccaaactaaaggtttggcagaaacaacggcaagacataaagctaatgagtttgttgctaataagaacaagcttaatgacaagaaaaagagtatttttggctatgagatagtgaagaataaacgttttacggtagataagtacctttttaagttgtctatgaatttgaattattcgcaaccaaataacaataaaattgatgtaaattctaaagttcgtgaaataattagtaatggaggtataaagaatattattggcatagatcgtggtgaacgtaatttactttatctgtctttaatagatctgaagggaaatattgtcatgcagaagtctctcaatattctcaaggatgatcataatgcaaaggaaactgattataaaggtttgctgacagaacgagaaggagaaaataaagaagctcgccgcaattggaagaagatagcgaatatcaaagatttaaaacgaggttatttaagtcaggtagtacatatcattagtaaaatgatggtagaatacaatgcaattgttgtacttgaagatttaaatccaggttttatcagaggcagacaaaaaatcgagcgtaacgtatatgaacaattcgaaagaatgctaattgacaagttgaatttttatgttgacaagcataaaggtgccaatgaaacgggaggtttgttgcatgcacttcagcttacttctgaatttaaaaatttcaagaaaagtgagcatcagaatgggtgtcttttctatattcctgcatggaatactagcaaaatagatcctgcaacaggttttgtcaatctctttaatacgaaatatacgaatgcagttgaggcgcaggagttctttagtaaatttgacgagattcgttacaacgaggagaaagattggtttgagtttgaatttgattacgataaattcactcagaaggcgcatggtacacgtactaagtggacgctctgtacttatggtatgcgtttgcgttcatttaaaaattctgcaaaacaatataattgggattcagaggtagtagcgcttaccgaagaattcaaaagaatacttggagaagcaggtattgatattcatgagaatctaaaagatgcaatctgtaatttggaaggtaaaagccagaagtatctcgaacctttgatgcagtttatgaaattgctgctacaattgcgtaatagtaaggctggtactgacgaagattatatcctttctccagttgctgatgagaatggaatattctacgatagccgttcttgtggtgatcaacttccggagaatgcggatgctaatggtgcttacaacatcgctcgcaagggactgatgctgattgagcaaatcaagaatgcagaggatttgaataacgtcaagtttgatatatccaataaggcttggctcaattttgcacaacaaaagccatataagaatggatga

SEQ ID NO: 843-845 - skipped (3 entries)

SEQ ID NO: 846 - DNA, 3903 bp, Acinetobacter indicus
atgaattttcaaccattttttcaaaaatttgtacacttatatccaatttccaaaaccttacgttttgaactaatcccacagggtgcaacacaaaaatttatttcagaaaagcaagtattgttacaagatgaaatcagagcacgtaaatatcctgaaatgaaacaggcgattgacggctaccataaagactttatccaacgtgcgctgagcaatattgacagtcaagtatttgaacaggcattaaatacatttgaagatttatttctacgctctcaagcagaaagagcgacagatgcctataaaaaagattttgaaacagcacaaacgaaactaagagaattaatcgttcatagttttgaaaagggtgaatttaaacaagaatataaatccctttttgataagaatttaatcaccaatttattaaagccttgggtggaacaacagaatcaaataggtgacagcaactatacgtatcatgaagattttaataaatttactacctacttcttaggtttccatgaaaatcgtaaaaacatttatagcaaggatccccacaagactgcccttgcctaccgtttaattcatgaaaatttacctaaatttttagaaaacaataaaattctactcaaaatccaaaatgatcatcctagtttgtgggaacaactgcaaacactcaatcaaacgatgcctcagttgtttgatggttgggatttctcgcaactgatgcaggtgtcattctttagcaatacattgacccaaacagggatcgaccaatacaacaccatcattggcggaatttctgaaggtgaaaaccgtcaaaaaattcaaggtatcaatgaactgattaatttatataaccaaaaacaagataagaaaaatcgtgtcgcaaaacttaaacaactgtataaacaaattttaagcgaccgcagcaccctgtcttttttacctgaaaaatttgttgatgataccgagctatatcatgcgatcaatatgttctatttagaacatttacatcatcaaagcatgatcaatggtcactcttacacgttgctagaacgtgtgcaattactcatcaatgaattagccaactatgatttgagtaaagtttatttagcaccgaatcaactgagtactgtttcccatcaaatgtttggagattttggctatatcggtcgggcattaaattattattatatgcaagtcatacaacctgattatgaacagttattagcaagtgctaaaacaaccaaaaaaattgaagcgactgaaaaactaaaaaccatatttctggatacccctcaaagccttgtggtgattcaagctgccattgatgaatatattcaattacaaccaagcacaaagccacatacacaattgaccgactttatcatctctctactcaaacaatatgaaactgtagcggatgatcaaagcattaaagtcatcaatgtttttagtgatattgaaggtaaatatagctgtatcaaaggtttagtgaatacaaaatctgagtcaaaacgcgaggtattacaagatgaaaaactagcgactgatattaaagcttttatggatgccgtcaacaatgtcataaaattacttaaacctttttcactaaatgaaaagttggttgcaagtgtagaaaaggatgcacgtttttatagtgactttgaagaaatttatcagtcattattaatttttgtgccactttataacaaagtccgaaattacattactcaaaaaccgtatagcactgaaaagtttaaacttaattttaacaaaccgaccttactgagtggttgggatgccaataaagaagccgataatttaagtattttacttagaaaaaatggcaattattatttagcgattatggatactgccaaaggtgcaaataaagcctttgagcctaagacactgaaccagctcaaagtcgatgatacaactgattgctatgaaaaaatggtctataagcttttgtcaggaccaagtaaaatgttccctaaagcttttaaagctaaaaataatgaaggtaactattatccaactccagagttacttacttcttataacaataacgagcatttaaaaaatgataaaaatttcacattagcatcattacatgcctatattgattggtgtaaagagtatataaatcgcaatccatcttggcatcaatttaattttaaattttcacccactcaatctttccaagatataagtcaattttattcggaagtttctagtcagagttataaagttcatttccaaacgattccaagtgactatattgatcaattggtggctgaaggcaaactgtatctgttccaaatttataataaagacttttcaccaaatgctaaaggtaaagaaaatttacataccttgtattttaaagccttatttagcgatgagaatttaaaacagcctgtatttaaactcagtggcgaagcagaaatgttctatcgccctgcttcgctgcaattggcaaacaccaccatccataaggcaggtgaaccaatggcggccaaaaacccattgacgccaaatgccactcgtactttggcttatgacattattaaagatcggcgttttaccactgacaaatatttgctgcatgtacccattagtttaaattttcacgcacaagaatcaatgagtattaaaaagcataatgacttagtccgtcagatgattaagcataatcatcaagatctgcatgtaattgggattgatcgtggtgaaaagcatttactctatgtcagtgtgatcgacttaaaaggcaatattgtctaccaagaaagccttaacagcattaaatcggaagcgcagaattttgaaacgccttatcatcaattgttgcagcaccgtgaagaaggtcgagcgcaagcccgtacagcatggggcaaaattgagaatattaaagaactcaaagatggttatttaagtcaggtggtgcatcgtattcagcaattgattttaaaatacaatgcgattgtgatgttagaagacctcaattttggctttaaacgtggtcgttttaaaattgaaaaacaaatttatcaaaagtttgaaaaagccctgattcataaactcaattatgtggtcgataaatctacccaagctgatgaacttggtggtgtgcgtaaagcctatcaattgactgccccttttgaatcctttgaaaaattaggtaaacaatcaggcgtgttattttatgtccctgcttggaacaccagtaaaattgaccctgtgacaggctttgttgatctacttaaacccaaatatgaaaacttagacaaagctcaagccttttttaatgcctttgacagcattcactataatgctcaaaaaaactattttgaatttaaggtcaatttaaagcagtttgcagggctcaaagctcaagcggctcaagcagaatggacgatttgctcttatggtgatgaacgccatgtgtatcaaaagaaaaatgcacagcagggtgaaacagtcattgtaaatgtgactgaagaattaaaagtcctgtttgcaaagaacaacattgaagttgcacaaagtgttgaacttaaagagacgatttgtacccaaacacaggtcgacttctttaaacgcttgatgtggctgttacaagtattgttggcactgcgttatagcagcagtaaagataaactcgattatattttgtctcctgttgccaatgcacaaggtgagttttttgattcacgccatgcatcggtacaattaccacaagactccgatgcaaacggtgcgtaccatattgccttaaaaggtttatgggtgattgaacaacttaaagctgctgataatttggataaggtcaaacttgccattagcaatgatgattggcttcactttgcacaacaaaaaccatatcttgcttaa

SEQ ID NO: 847-849 - skipped (3 entries)

SEQ ID NO: 850 - DNA, 3618 bp, Pseudobutyrivibrio xylanivorans
atgtattatcagggtttaacaaagctatatccaattagtaaaactattagaaacgaattaattcctgtaggaaagactttagaacatattagaatgaataatattcttgaggctgatattcagagaaaatcagattatgaacgtgtaaagaagctaatggatgactatcataagcaattaataaatgagtctttgcaagatgtccatttgtcttatgttgaggaggcagctgatctatatctaaatgcttctaaggataaagatattgtagataagtttagtaagtgtcaggataaattgcgaaaagagatagttaatctcttgaagagtcatgaaaactttccaaagataggaaacaaggaaataataaaattactacagagtctttctgatactgaaaaagactataacgcgttggattcatttagcaagttttatacatattttactagctacaatgaggttagaaagaatttgtattccgatgaagaaaaatcatccacagcggcatatcgattgataaatgaaaatttgcctaaatttctagataatattaaggcttattctattgctaaatctgcaggtgtgcgagctaaagaactgaccgaagaagaacaggattgtctttttatgactgaaacttttgaaaggacacttactcaggatggaattgataattataacgaattgattggaaagcttaattttgcgattaatctatataatcagcaaaataataaactcaagggatttcgtaaagtacctaagatgaaagaactgtataaacagattttgtcggaaagagaggcatcatttgttgatgaatttgttgatgatgaagcattgctaactaacgtagagtctttttctgcacatattaaagagtttttggaatcggattctctttcaagatttgcggaagtccttgaagaatctggtggggaaatggtttatataaaaaatgatacttcaaagacaacattttcaaatatagtatttggctcttggaacgtaattgatgaaagattggcagaggaatatgattctgctaattctaagaaaaagaaggacgaaaaatattacgataagcgtcataaagaactgaaaaagaacaagagctattctgtggagaagatagtttcattatcaacggaaacagaggatgtgattggaaaatatatagagaagcttcaagcggacattattgctataaaagagacgcgagaagtttttgagaaagttgttcttaaggagcatgataagaataaatctcttagaaagaatactaaagccatcgaggcaattaaatcatttttagatacaataaaagattttgagcgagatataaaacttattagcggtagcgagcatgagatggagaagaatcttgccgtttatgcagagcaagagaatattttatcttcaattagaaatgtggattctctatacaatatgtcaagaaattatctcacccaaaagcctttttcaacagaaaagtttaagttgaattttaatagggcaacattattaaatgggtgggataaaaataaagaaactgataatctaggtattcttttggtaaaagaaggaaaatattacttaggaattatgaatactaaagctaataaaagttttgtaaatccacctaagccgaagacagacaatgtatatcataaagtgaattataagctattaccaggaccaaataagatgttgcctaaggtcttttttgcaaagtcaaatcttgaatattacaaaccatcagaagacttgctagcaaaatatcaagcgggtacacataagaaaggagagaatttttctttagaagattgccattcattgatttctttctttaaagactctctagaaaagcatccagactggtcagaatttggatttaagttttctgatacaaaaaaatatgatgatttgagtggattttatagagaggtagagaagcaaggatataagataacatatacggatattgatgtagagtatattgatagtttggttgaaaaagatgagttgtatcttttccaaatctacaataaggatttctcgccatatagtaaggggaattataatctccacacgctatatctgacgatgttatttgatgagcgtaatttacgtaatgtggtttataaattaaatggtgaggctgaagttttttatagacctgcttcaattggaaaggatgaactaattattcataaatctggagaggaaataaagaataagaatccaaagagggctattgataaaccaacaagtacattcgaatatgatatcgtcaaagatcgaagatatactaaggataaatttatgttacatattccagtaactatgaattttggcgtggatgaaactagaagattcaatgaggtcgttaatgatgctataaggggagatgataaagttagagtcattggaattgatagaggcgagagaaatttattatatgtagtagttgttgattctgatggaactattttggagcagatttctcttaattctattattaataatgagtattcgatagaaacagattatcacaaattgctggatgagaaagaaggggatagagacagagcacgcaaaaattggactactatagaaaatattaaagaacttaaagaggggtatctaagtcaggtagttaatgttatagcaaaattggttttgaaatatgatgctattatctgccttgaagatttgaattttggatttaagcgtggacgtcaaaaagttgaaaaacaggtatatcagaaattcgaaaaaatgcttattgataaattgaattatttagttattgataagagtagaagccaagagaatcctgaagaagttggacatgtcttgaatgcgttacagttaacttcaaaatttactagttttaaggaattaggtaaacagacaggtattatttattacgttcctgcgtatttaactagtaaaattgatccgacaacaggtttcgcaaatctcttttacgtaaaatatgagagtgttgaaaagtccaaagatttctttaatagatttgatagcatttgttttaacaaagtagcaggttattttgagtttagctttgattataaaaactttactgatagagcctgtggtatgagaagtaaatggaaagtatgtaccaatggtgaacgaatcattaaatatagaaatgaagaaaagaacagttcttttgatgataaggtgatagttttaacggaagaatttaagaagttgttcaatgagtatggcattgcttttaatgattgtatggacctgactgatgcaataaatgctattgatgatgctagtttcttcagaaagttgactaaattgttccaacagacattgcagatgcgaaatagttcggctgatggttccagagattatattatctcgccagttgagaatgataacggggagttttttaactccgaaaaatgcgataaatcaaaaccaaaagatgctgatgctaatggagcatttaatattgccagaaagggattatgggtgttagaacaactttataattcatcatcaggagaaaagcttaatttagcaatgacaaatgctgaatggttagagtatgcacagcaacatacgatttaa

SEQ ID NO: 851-853 - skipped (3 entries)

SEQ ID NO: 854 - DNA, 3921 bp, Prevotella sp.
atggctaagaattttgaagattttaaaagactttatcctctttcaaagactttgcgctttgaagcgaagcctattggcgccactttggataatatagttaagagtggtttgttggaagaagatgaacacagagctgcaagctatgtgaaggtgaagaaattgattgatgaataccacaaggtatttattgatagagtgttggataatggatgtttgcctttggatgataaaggtgataataattcattggcagaatattatgagagctatgtatctaaagcgcaagatgaggatgcaataaagaagtttaaggaaattcagcaaaatcttctctctattatagctaaaaagctaacagacgataaggcttatgctaatttgtttggtaataaacttatagagtcatataaggacaaagctgataagacaaagctaattgattcagatttgattcaattcatcaatactgcggaatcaactcaacttgtttcaatgtcacaagatgaggccaaagaactcgtaaaagaattctggggctttactacatattttgaaggtttcttcaaaaatcgtaaaaatatgtatactccagaagaaaagtctactggtattgcttatcgtctaatcaatgaaaaccttccaaagttcattgataatatggaggctttcaagaaagctatcgctagaccagagatacaggctaacatggaagagttatactctaatttttctgaatacttaaatgtagaaagtattcaggagatgttcctgcttgactattacaatatgcttcttactcaaaagcagattgatgtctataatgctataattggaggaaaaaccgatgatgagcacgatgttaagattaaaggtatcaacgagtatatcaatctctataatcagcagcataaagatgacaagttaccaaaacttaaggcattgtttaagcagattcttagtgatagaaatgcaatatcttggttgccagaagagttcaatagtgatcaggaagtcttgaatgcaatcaaggattgctatgagcgattggctgaaaatgttttgggtgataaggttctcaagtctttgcttggttctttggcagattattctcttgatgggatatttatccgtaatgacttgcagttgactgatatttctcagaaaatgtttggaaattggggtgtgattcagaatgctatcatgcagaatataaagcatgttgctcctgcaagaaagcataaggagtctgaggaagattacgaaaaaagaattgctggtatattcaaaaaggcagatagttttagtatcagttatataaatgattgcttgaacgaagcagatcctaataatgcctactttgtagagaactatttcgcaacatttggagcggtaaatactccaacaatgcagcgtgagaatctgtttgcgcttgttcaaaatgcgtatacagaagttgctgcattacttcattctgattatcctacggtaaagcatctggcacaagacaaggctaatgtttctaaaatcaaagcactgttggatgcaataaagtctttgcagcatttcgtgaagcctctgttgggcaagggtgatgaaagtgataaagatgaacgtttctatggtgaactagcttcgttgtgggcagaacttgatacagtgacaccgctgtataatatgattcgtaattatatgactcgtaaaccatattctcaaaagaaaatcaaacttaactttgagaatcctcaattgcttggtggttgggatgctaataaggagaaagactatgctaccattatcttacgtcgtaatgggttgtattatcttgctattatggacaaagactcaaggaagttattgggtaaggcaatgccgtcagatggggagtgctatgagaaaatggtatataagttcttcaaagacgtgacaacgatgataccaaagtgtagtacacaattaaaagatgtacaagcttattttaaggttaatacagatgattacgtcttaaatagcaaggcgtttaacaggccattgacgataacaaaggaagtctttgatttgaacaatgtattgtatggtaagtataagaaattccaaaagggatacttgactgctactggtgataatgtaggttatactcatgctgtaaacgtatggataaaattctgtatggattttttggacagctatgatagcacttgcatatatgatttctcttctttgaaaccggagtcatatttgtcactcgactctttctatcaggatgttaatttgttgttgtataaattgtcgtttacagatgtatctgcatcatttattgatcagcttgttgaggagggaaagatgtatctgttccaaatctacaataaggatttctctgagtatagcaagggcactccaaatatgcatactctttattggaaagcattgtttgatgaacgtaatctggcagatgtagtttacaagcttaacggacaggcagagatgttctatcgtaagaaaagtatagaaaatactcatccaactcatcctgctaatcatcctattcttaataagaataaggataacaagaaaaaagaaagcttgtttgaatatgatcttataaaagatcgtcgctacactgttgataaatttatgttccatgtgccaatcacaatgaactttaaaagttctggttctgagaacatcaatcaagatgtgaaggcgtatttgcgtcacgcagatgatatgcatattattggtattgatcgtggcgaacgtcatttgctgtatttggttgtaattgatttgcaaggtaatatcaaggagcagttctcgcttaatgaaattgtgaatgattataatggtaatacctatcataccaattatcacgatttgttggatgttcgtgaagacgaacgactcaaagctcgtcaaagttggcagaccatcgaaaatatcaaagagctgaaagagggctatttgtctcaggttatccacaagattacacagctcatggttagatatcatgccattgttgttttggaagatctgagcaagggatttatgcgtagtcgtcaaaaggtagaaaagcaagtatatcagaagtttgaaaaaatgttgatagataagcttaactatttggtagacaaaaaaactgatgtttctactcctggaggcttgctgaatgcataccaacttacctgtaagtctgatagttctcaaaagttaggaaaacagagcggattcctgttctatatccctgcatggaatacatctaagatagacccagttacaggatttgtcaacttgttggatactcattctttaaattctaaagagaaaatcaaagcattcttctctaagtttgatgctatccgttataataaggataagaaatggtttgagtttaatctcgactatgacaagtttggtaaaaaagcggaagatacaaggactaagtggactttatgcaccagaggaatgcgtattgatactttcagaaataaagaaaagaactcgcagtgggataatcaggaagttgacttgacaacagagatgaaatctttattggagcattattatatcgacattcatggtaatctcaaggatgctatcagtacgcaaacagacaaagcgttctttactggcttgctgcacatattgaagttgaccttgcagatgcgtaatagtattactggaaccgaaacagattacttagtgtctcctgttgccgatgagaatggaatattctacgatagccgttcttgtggtgatcagcttcctgagaatgcggatgctaatggtgcttacaacatcgctcgcaagggactgatgttggttgagcagataaaagatgctgaggatttggataatgtgaagtttgatatatccaataaggcttggctcaattttgcacaacaaaagccatataagaatggatga

SEQ ID NO: 855-857 - skipped (3 entries)

SEQ ID NO: 858 - DNA, 3921 bp, Prevotella copri
atggctaagaattttgaagattttaagagactttattctctttcaaagactttgcgctttgaagcgaagcctattggtgccactttggataatatagtcaaaagtggtttgctggatgaagatgaacacagagctgcaagctatgtgaaggtgaagaaattgattgatgaatatcacaaggtatttattgatagagtgttggatgatggctgtttgcctttggaaaataaaggtaataataattcattggcagaatattatgagagctatgtatctagagcgcaagatgaggatgcaaaaaagaagtttaaggaaatacagcaaaatcttcgttctgtcattgcgaaaaaactaaccgaagataaggcttatgctaatttgtttggtaacaaacttatagagtcgtataaggacaaagaggataagaaaaagataattgattcagatttgattcaattcatcaataccgcagaatcaactcaacttgattctatgtcacaagatgaggccaaagaacttgtgaaagaattctggggctttgttacttatttttacggcttctttgataatcgtaaaaatatgtatacggcagaagagaagtcaactggtattgcttatcgactagttaatgaaaaccttccaaaattcattgataatatagaggcttttaatagagctataaccagaccagagatacaggaaaatatgggagtcttgtattcagatttttccgaatacttaaatgtagaaagtattcaggagatgttccagcttgactattataatatgctccttactcaaaagcagattgatgtctataatgctataattggaggaaaaaccgatgatgagcacgatgttaagattaaaggtatcaatgagtatatcaatctctacaatcagcagcataaagatgacaagttaccaaaacttaaggctttgtttaagcagattcttagtgatagaaatgcaatatcttggttgccagaagagttcaatagtgatcaggaagtcttgaatgcaatcaaggattgctatgagcgattggctgaaaatgttttgggtgataaggttctcaagtctttgcttggttctttggcagattattctcttgatgggatatttatccgtaatgacttacagttgactgatatttctcagaaaatgtttggaaattggggcgtgattcagaatgctatcatgcagaatataaagcgtgtcgctcctgccagaaagcataaggagtctgaggaagattacgaaaaaagaattgctggtatattcaaaaaggcagatagctttagtatcagttatataaatgattgtttgaacgaagcagatcctaataatgcctactttgtagagaactattttgcaacatttggagcggtaaatactccaacaatgcagcgtgagaatctgtttgcgcttgttcaaaatgcgtatacagaagttgctgcattacttcattctgattatcctacagtaaagcatctggcacaagacaaggctaatgtttctaaaatcaaagcactgttggatgcaataaagtctttgcagcatttcgtgaagcctctgttgggcaagggtgatgaaagtgataaagatgaacgtttctatggtgaactagcttcgttgtgggcagaacttgatacagtgacaccgctgtataatatgattcgtaattatatgactcgtaaaccatattctcaaaagaagatcaaacttaactttgagaatcctcaattgcttggtggttgggatgctaataaggagaaagactatgctaccattatcttacgtcgtaatgggttgtattatcttgctattatggacaaagactcaaggaagttattgggtaaggcaatgccgtcagatggggagtgctatgagaaaatggtatataagttcttcaaagacgtgacaacgatgataccaaagtgtagtacacaattaaaagatgtacaagcttattttaaggttaatacagatgattacgtcttaaatagcaaggcgtttaacaagccattgacgataacaaaggaagtctttgatttgaacaatgtattgtatggtaagtataagaaattccaaaagggatacttgactgctactggtgataatgtaggttatacccatgctgtaaacgtatggataaaattctgtatggattttttgaacagctatgatagcacttgcatatatgatttctcttctttgaaaccagagtcatatttgtcgcttgatgcattctatcaagatgctaatttgttgttgtataaattgtcttttgcaagagcatctgtatcgtatatcaaccagcttgttgaggaggggaagatgtatctgttccaaatctacaataaggatttctctgagtatagcaaaggcactccaaatatgcatactctttattggaaagcattgtttgatgaacgtaatctggcagatgtagtttacaagcttaacggacaggcagagatgttctatcgtaagaaaagtatagaaaatactcatccaactcatcctgctaatcatcctattcttaacaagaataaggataacaagaaaaaagaaagcttgtttgactatgatcttataaaagatcgtcgctacactgttgataaatttatgttccatgtgccaatcacaatgaatttcaagagcgttggctcagagaatatcaatcaagatgtgaaggcgtatttgcgtcatgcagatgatatgcatattattggtattgatcgtggtgaacgtcatttgctttatctggttgttatagatttgcagggaaatatcaaggaacagtactcgcttaatgaaatagtgaatgagtataatggtaatacctatcataccaattatcacgatttgttggatgttcgtgaagaagaacgacttaaagctcgtcaaagttggcagaccatcgaaaatattaaagagctgaaagagggctatttgtctcaggttatccacaagattacacagctcatggttagatatcatgccattgttgttttggaagatctgagcaagggatttatgcgtagtcgtcaaaaggtagaaaagcaagtatatcagaagtttgaaaaaatgttgatagataagcttaactatttggtagacaaaaaaactgatgtttctactcctggaggcttgctgaatgcataccaacttacctgtaagtctgatagttctcaaaagttaggaaaacagagcggattcctgttctatatccctgcatggaatacatctaagatagacccagttacaggatttgtcaacttgttggatactcattctttaaattctaaagagaaaatcaaagctttcttctctaagtttgatgctatccgttataataaggataagaaatggtttgagtttaatctcgactatgacaagtttggtaaaaaagcggaagatacaaggactaagtggactttatgcaccagaggaatgcgtattgatactttcagaaataaagaaaagaactcgcagtgggataatcaggaagttgacttgacaacagagatgaaatctttattggagcattattatatcgacattcatggtaatctcaaggatgctatcagtgcgcaaacagacaaggccttctttacgggattgctacacattttgaagttgactttgcagatgcgtaatagtatcactggaacagaaactgattatctggtatctcctgttgccgatgagaatggaatattctacgatagccgttcttgtggtaatcaacttcctgagaatgcggatgctaatggtgcttataacatcgctcgcaagggactgatgctgattgagcaaatcaagaatgcagaggatttgaataacgtcaagtttgatatatccaataaggcttggctcaattttgcacaacaaaagccatataagaatggatga

SEQ ID NO: 859-861 - skipped (3 entries)

SEQ ID NO: 862 - DNA, 3825 bp, Prevotella copri
atggctaagaattttgaagattttaagagactttattctctttcaaagactttgcgctttgaagcgaagcctattggtgccactttggataatatagtcaaaagtgatttgctggatgaagatgaacacagagctgcaagctatgtgaaggtgaagaaattgattgatgaatatcacaaggtatttattgatagagtgttggatgatggctgtttgcctttggaaaataaaggtaataataattcattggcagaatattatgagagctatgtatctagagcgcaagatgaggatgcaaaaaagaagtttaaggaaatacagcaaaatcttcgttctgtcattgcgaaaaaactaaccgaagataaggcttatgctaatttgtttggtaacaaacttatagagtcgtataaggacaaagaggataagaaaaagataattgattcagatttgattcaattcatcaataccgcagaatcaactcaacttgattctatgtcacaagatgaggccaaagaacttgtgaaagaattctggggctttgttacttatttttacggcttctttgataatcgtaaaaatatgtatacggcagaagagaagtcaactggtattgcttatcgactagttaatgaaaaccttccaaaattcattgataatatagaggcttttaatagagctataaccagaccagagatacaggaaaatatgggagtcttgtattcagatttttccgaatacttaaatgttgagagtattcaggaaatgttccagcttgactattataatatgttgcttactcaaaagcagattgatgtctataatgctataattggtggaaaaactgatgatgaacacgatgttaagattaaaggtatcaacgattatatcaatctctacaatcagaagcataaagatgacaaattaccaaaacttaaggcattgtttaagcagattcttagtgatagaaatgcaatatcttggttgccagaagagttcaatagtgatcaggaagtcttgaatgctatcaaggattgttatgagcgattgtctgaaaatgttttgggtgataaggttctcaagtctatgcttggttctttggcagattattctcttgatgggatatttatccgtaatgacttacagttgactgatatttctcagaagatgtttggaaattggagcgtgattcaaaatgccattatgcagaatataaagcatgttgctcctgccagaaaacataaggaatctgaggaagaatacgaaaatagaattgctggtatattcaaaaaggcagatagctttagtatcagctatatagatgcttgtttgaacgaaacagacccaaataatgcctactttgtagagaactattttgcgacattgggtgcagtagatactccaacgatgcagcgtgagaacttgtttgcgcttgttcaaaatgcatatactgagataacagcattactccattctgattatccaactgagaaaaatttagcacaggacaaggctaatgttgctaaaatcaaagcattgttggatgcgattaagtctttgcaacatttcgtaaagcctctgttggggaagggagatgaaagtgataaagatgaacgtttctatggtgaattggcttcgttgtgggcagaacttgatacaatgacaccgctgtataatatgattcgtaattatatgactcgtaagccatattcccaaaagaagatcaaacttaactttgagaatcctcaattgcttggggggtgggatgcaaataaggagaaagactatgctaccattatcttacgtcgtaatggtttgtattatcttgctattatgaacaaagactcaaagaaattattgggtaaagcaatgccttctgatggggagtgctatgaaaaaatggtatataagttattgcctggtgctaataagatgcttccgaaagtgttctttgctaaatcaagaatggaagattttaagccaagtaaggaacttgttgagaaatattacaatggtactcacaaaaagggaaagaatttcaatattcaagattgccataatttgatagattactttaagcagtctattgataagcatgaagactggagcaagtttggatttaaattctcagatacttctacatacgaagaccttagtggattctatcgtgaagtagaacagcagggttataagttgtcttttgcaagagtatctgtttcgtatatcaaccagcttgttgaggaggggaagatgtatctgttccaaatctacaataaggatttctctgagtatagcaaaggtactccaaatatgcatactctttattggaaagcattgtttgatgaacgtaatctggcagatgttgtttacaagcttaatggacaggcagagatgttctatcgtaagaaaagtatagaaaatactcatccaactcatcctgctaatcatcctattctgaataagaataaggataataagaaaaaagaaagcttgtttggctatgatcttataaaagatcgtcgctatactgttgataaatttttgttccatgtgccaatcacaatgaactttaaaagttctggttctgagaacatcaatcaagatgtgaaggcgtatttgcgtcacgcagatgatatgcatattattggtattgatcgtggcgaacgccatttgctttatttggttgtaattgatttgcaaggaaatatcaaggaacagttctcgcttaatgaaattgtgaatgattataatggtaatacctatcataccaattatcacgatttgttggatgttcgtgaagacgaacgactcaaagctcgtcaaagttggcagaccatagagaatatcaaagagctgaaagagggctatttgtctcaggttatccacaagattacacagctcatggttaaatatcatgccatagttgtattggaggatttgaacatgggatttatgcgtggtcggcaaaaggtagaaaagcaagtatatcagaaatttgagaaaatgttgatagaaaagctaaactatttagttgacaagaaggctgatgcttctgtttctggaggtttgttgaatgcataccagttgactagcaagtttgatagtttccaaaagctaggaaaacagagcggattcctgttctatattcctgcatggaatacatctaagatagacccagttacaggatttgtcaacttgttggatactcgatatcaaaatgtagaaaaggcaaaaagtttcttctctaagtttgatgctatccgttataataaggataaggaatggtttgagtttaatctcgactatgacaaatttggtaaaaaagcagagggtacaaggactaagtggactttatgtactcgaggaatgcgtattgatactttcagaaataaagaaaaaaactcacaatgggacaaccaggaagtagacttgactgctgagatgaaatctttattggagcattattatattgacattcatagtaatctcaaggatgctatcagtgcgcaaacagacaaggccttctttacgggattgctacacattttgaagttgaccttgcagatgcgtaatagtatcactggaacagaaactgattatctggtatctcctgttgtcgatgagaatggaatattctatgatagtcgttcttgtggtgatgaacttcctgagaatgcggatgctaatggtgcttataatatcgctcgtaagggactgatgatgattgagcagataaaagatgctaaggatttggataacttgaagtttgatatttccaataaggcttggctcaattttgcacaacaaaagccatataagaatggatga

SEQ ID NO: 863-865 - skipped (3 entries)

SEQ ID NO: 866 - DNA, 3756 bp, Moraxella bovoculi
atgttgtttcaagactttacccatttatatcccttatcaaaaaccgtgcgttttgaattaaagcccattggcaggacattagagcatatccatgccaaaaactttttgagccaagatgagaccatggcggacatgtaccaaaaggtgaaggtgatactcgacgattatcatcgtgattttatcgctgatatgatgggcgaagttaagctaactaagctggcagaattttatgatgtgtatttaaaatttagaaaaaatcccaaagacgatgaattgcaaaaacagctaaaggacttgcaagcagttttaagaaaagagagtgtgaagcccatcggtaatggcggaaaatacaaggcgggtcatgaccgcttgtttggggcaaagctctttaaggacggcaaagagcttggtgatttggcaaaatttgtcatcgcccaagagggtaagtcatcgccaaagcttgctcaccttgcccattttgagaagtttagcacttactttactggttttcatgataaccgcaaaaacatgtacagcgatgaggataaacacaccgccattgcctatcgtctgatacatgaaaacctgccacgttttattgacaacctacaaatactgacaaccatcaaacaaaagcactcggcgttgtatgaccagattataaatgagctgactgcgagtggcttggatgtgtcgctggcaagtcatctggacggctatcacaagcttttaacccaagagggtatcacggcttataataggataataggtgaagtgaatggttatacgaataagcacaatcaaatttgccacaaatccgaacgtatcgccaaattacgccccctacacaaacaaatcctaagcgacggcatgggtgtgtcatttttgccaagcaaatttgctgatgatagcgagatgtgtcaagcggtcaatgaattttaccgccattatgccgatgtttttgccaaggtgcaaagcttgtttgatgggtttgatgaccatcaaaaggacggcatttatgttgagcataaaaatttaaatgaactatccaagcaggcatttggtgattttgccttgttgggtcgggtgctggacggctattatgtggatgtggtgaatccagagtttaatgaaagatttgccaaagccaaaaccgacaatgccaaagcaaaactgactaaagaaaaagacaaattcatcaaaggcgtacactccttggcaagccttgagcaggcgataaagcatcatactgctaggcatgatgatgagtctgtgcaggcgggcaaacttggacagtatttcaaacacggtctggcaggcgtggataatccaatccaaaaaatacacaacaaccacagcaccattaagggttttttggagcgtgaacgtccagcaggcgagcgagcattgcccaaaattaagtcaggcaaaaaccctgaaatgacgcagttaagacagctaaaagagctgctagacaatgccctaaacgtggcgcattttgccaagttattaatgaccaaaaccacgctagacaaccaagacggcaatttttatggtgagtttggggtgttgtatgatgagcttgccaagattcccacgctttataacaaagtgcgcgattatctgtcgcaaaagccatttagcaccgaaaaatataaattaaactttggcaatccgacattattaaacgggtgggatttgaataaagaaaaagataattttggggttatcttacaaaaagacggctgttattatttggcgttattagataaagctcataaaaaagtatttgataatgctccaaatacaggcaaaaatgtttatcaaaaaatgatttataaattattgcccggacctaataaaatgctacccagagtattttttgccaagagtaatttggattattataacccttctgctgaactactggataaatatgcacaaggcacgcacaaaaaaggcgataattttaatctaaaagactgccatgcgttgattgatttttttaaggcgggtattaataaacatccagaatggcaaaattttggttttaaattttcgccaaccagtagctatcgagatttgagtgatttttatagagaagtcgaaccacaaggttatcaagtaaaatttgtggatatcaacgccgattatattgacgagttggttgaacaaggtcagttgtatttattccagatttataataaagatttctcgcccaaggctcacggtaagcctaatttacatactttatattttagggcgttatttagtgaagataatcttgccaatccgatttataagttaaatggcgaggcacagatattttatcgcaaggcgtctttgggtatgaatgaaaccaccattcatcgtgcaggcgagatattagaaaataaaaatcccgataatcccaaagaacgtgtatttacctatgacatcatcaaagatagacgctatacccaagataagtttatgctacatgtgcctattaccatgaattttggcgtgcagggcatgacgattaaagaatttaataaaaaagtgaatcaaagcatacggcaatatgatgatgtcaatgtcataggcatagaccgtggcgagcgacatttgctatatctgaccgtgattaatagcaaaggtgaaatcttagaacagcgtagtctcaatgacatcactaccgcatcagcaaatggcacacaaatgaccacgccttatcataagatactggacaaaagagaaatagaacgcctaaatgctcgtgtcggttggggtgagattgagaccataaaagagctaaaatcgggctatctaagccatgtggtacatcaagtcagccagcttatgcttaaatataatgccattgtggtattagaggatttaaattttgggtttaagcgtggtcgctttaaggtggaaaaacaaatttaccaaaactttgaaaacgccttaatcaaaaagctaaaccatttggaattaaaagataaggcagatgatgagattggctcatacaaaaatgccctgcaattgaccaataattttactgatctaaaaaacattggcaaacaaacaggctttttattctatgtgcctgcatggaataccagtaaaatagaccctgaaacgggctttgtggatttgttaaaaccacgttatgaaaatatcgctcagtcgcaagcgttttttggtaaatttgataagatttgttataacgcagataaggattattttgaatttcatattgattatgccaaatttactgacaaagccaaaaactctcgccaaacatggacgatttgctcgcatggcgataaacgttatgtgtatgacaaaaccgccaatcaaaataaaggagcgaccaagggtattaatgttaatgatgaattaaaatcgctatttgctcgctatcacatcaatgaaaaacagccaaatttggtcatggatatttgccaaaataacgacaaagaatttcataaatcgctgatgtatctattaaagacattgcttgcattacgatatagtaacgccagtagcgatgaagattttattttatcgcctgtggcaaatgatgagggtgtgttttttaattcggcattggcggatgatacacagccacaaaatgcggatgccaatggggcatatcatatcgcattaaagggcttatggctattaaatgagctaaaaaacagtgatgatttgaataaagtcaaacttgccattgataatcaaacatggctaaacttcgctcaaaaccgctaa

SEQ ID NO: 867-869 - skipped (3 entries)

SEQ ID NO: 870 - DNA, 3756 bp, Moraxella lacunata
atgttatttcaagactttactcatttataccccctatcaaaaaccgtgcgttttgaattaaagcccattggtaagacattagaacatatccacgccaaaaactttttgagccaagatgagaccatggcggacatgtaccaaaaggtaaaggcgatactggacgattatcatcgtgattttatcaccaagatgatgagcgaggtgacattaactaaactgccagagttttatgaggtttatttggcattacgaaaaaatcccaaagatgacacattgcaaaaacagctaaccgagatacaaaccgctttacgagaagaggtagtcaagccgatagacagtggtggcaaatacaaggctggttatgaacgcttatttggggcaaagctctttaaagacggcaaagagcttggtgatttggcaaaatttgtcatcgcccaagagggcgagtcatcgcccaagcttccccaaattgcccattttgagaagtttagtacttactttacgggctttcatgataaccgcaaaaacatgtacagtagtgatgataagcataccgccattgcctatcgtctgattcatgaaaacttgccacgttttatcgataatctacaaatactggtaaccatcaaacaaaagcactcggtattgtatgaccagattgtaaatgagctaaatgccaacggtttggatgtgtcgctggcaagtcatctggacggctatcacaagcttttaacccaagagggtatcacggcttataataggataataggtgaagtgaatagttatacgaataagcataatcaaatttgccacaaatctgaacgtatcgccaaattacgccccctgcacaaacaaatcctaagcgacggcatgggcgtgtcatttttgccaagcaaatttgccgacgatagcgagatgtgccaagcggtcaatgaattttaccgccattatgcccatgtttttgccaaggtgcaaagcttatttgatagatttgatgactatcaaaaggacggcatttatgttgagcataaaaatttaaatgagctatctaagcaggcatttggcgattttgctttgttgggtcgggtgttagacggctattatgtggatgtggtgaatccagaatttaacgataaatttgccaaagccaaaaccgacaatgccaaagaaaaactgacaaaagaaaaagacaaattcatcaaaggcgtgcattccttggcaagtcttgaacaggcgatagagcattatattgctgggcatgatgatgagtctgtgcaggcgggcaagcttgggcagtatttcaaacatggcttggcgggggtggacaatccaatccaaaaaatacacaacagccacagcaccattaaggggtttttggagcgtgaacgcccagcaggcgagcgaacattgcccaaaatcaaatcagataaaagtcttgaaatgacacagttaagacaactaaaagaactgctagacaacgccctaaatgtggtgcattttgctaagttattaacgaccaaaaccacgctagataaccaagacggcaatttttatggtgagtttggggcattgtatgatgagcttgccaagattgccacgctttataacaaagtgcgtgattatctgtcccaaaagccatttagcaccgaaaaatacaaattaaactttggcaacccgacattattaaacggttgggatttgaataaagaaaaagataattttggggttatcttgcaaaaagacggttgttattatttggcgttattggataaagctcataaaaaagtatttgataatgctccaaatacaggcaaaagtgtttatcaaaaaatggtttataaattattgcctggccctaataaaatgctacccaaagtgttttttgccaagagtaatttggattattataatccttctgcagagctactggataaatatgcacaaggcacgcacaaaaaaggcgataattttaatctaaaagattgtcatgcgttgattgatttttttaaggcgagtattaacaaacatccagaatggcaacattttggttttgaattttcgctaaccagtagctatcaggatttaagtgatttttatagagaagttgaaccacaaggttatcaagtaaaatttgtggatattgatgccgattatattgatgagttggttgagcagggtcagttgtatttattccagatttataataaagatttctcgcccaaggctcatggtaaacctaatttacatactttgtattttaaggcgttatttagtgaggataatcttgccaatccaatttataaattaaatggcgaggcggagatattttatcgcaaggcatctttggatatgaatgaaaccaccattcatcgtgcaggcgaggtattagaaaataaaaatcccgataatcccaaagagcgtcaatttgtctatgacatcatcaaagacaaacgttatacccaagataagtttatgctacacgtgcctattaccatgaattttggtgtgcagggcatgacgattaaagaatttaataaaaaagttaatcaaagcatacaacaatatgatgaggtgaatgtgattggcatagaccgtggcgagcgacatctgctatatctgaccgtgattaacagcaaaggtgaaatcttagaacagcgtagtctcaatgacatcatcaccacatcggcaaacggcacacaaatgaccacgccttatcataagatactggacaaaagggagatagaacgcctaaatgctcgtgtcggttggggtgaaattgagaccattaaagagctaaaatcgggctatctaagccatgtggtacatcaaatcagtcagcttatgcttaaatataacgccattgtggtgttggaagatttgaattttgggtttaagcgtggtcgctttaaggtggaaaaacaaatttaccaaaactttgaaaacgccctaatcaaaaaactcaaccatttggtattaaaagacaaggcagataatgagattggctcatacaaaaatgccttgcaactgaccaataattttaccgacctaaaaagcattggcaagcaaacaggctttttattctatgtgcctgcatggaataccagtaaaatagaccctgtaacgggctttgtggatttgttaaaaccacgttatgaaaatatcgctcaatcgcaagcgttttttgataagtttgataagatttgttataacgcagacaagggttattttgaatttcatattgattatgccaaattcactgacaaagccaaaaattctcgccaaatatggacgatttgttcgcatggcgataaacgctatgtgtatgacaaaaccgccaaccaaaataaaggggcgaccattggcattaatgtcaatgatgaattaaaatcgttatttgctcgttatcgcatcaatgacaaacagccaaatctggtcatggatatttgccaaaataacgataaagaatttcataaatcgctaacgtatctgttaaaggcattgcttgcattacgatatagtaatgccagtagtgatgaagattttattttatcgcctgtggcaaatgacaagggtgtgttttttaattcggcgttggcagatgatacacagccacaaaatgcggacgccaatggtgcgtaccatatcgcattaaaggggctgtggctattaaacgaattaaaaaacagcgatgatttggataaagtcaaacttgccattgataatcaaacatggctaaacttcgctcaaaaccgctaa

SEQ ID NO: 871-873 - skipped (3 entries)

SEQ ID NO: 874 - DNA, 3756 bp, Moraxella lacunata
atgttatttcaagactttactcatttataccccctatcaaaaaccgtgcgttttgaattaaagcccattggtaagacattagaacatatccacgccaaaaactttttgagccaagatgagaccatggcggacatgtaccaaaaggtaaaggcgatactggacgattatcatcgtgattttatcaccaagatgatgagcgaggtgacattaactaaactgccagagttttatgaggtttatttggcattacgaaaaaatcccaaagatgacacattgcaaaaacagctaaccgagatacaaaccgctttacgagaagaggtagtcaagccgatagacagtggtggcaaatacaaggctggttatgaacgcttatttggggcaaagctctttaaagacggcaaagagcttggtgatttggcaaaatttgtcatcgcccaagagggcgagtcatcgcccaagcttccccaaattgcccattttgagaagtttagtacttactttacgggctttcatgataaccgcaaaaacatgtacagtagtgatgataagcataccgccattgcctatcgtctgattcatgaaaacttgccacgttttatcgataatctacaaatactggtaaccatcaaacaaaagcactcggtattgtatgaccagattgtaaatgagctaaatgccaacggtttggatgtgtcgctggcaagtcatctggacggctatcacaagcttttaacccaagagggtatcacggcttataataggataataggtgaagtgaatagttatacgaataagcataatcaaatttgccacaaatctgaacgtatcgccaaattacgccccctgcacaaacaaatcctaagcgacggcatgggcgtgtcatttttgccaagcaaatttgccgacgatagcgagatgtgccaagcggtcaatgaattttaccgccattatgcccatgtttttgccaaggtgcaaagcttatttgatagatttgatgactatcaaaaggacggcatttatgttgagcataaaaatttaaatgagctatctaagcaggcatttggcgattttgctttgttgggtcgggtgttagacggctattatgtggatgtggtgaatccagaatttaacgataaatttgccaaagccaaaaccgacaatgccaaagaaaaactgacaaaagaaaaagacaaattcatcaaaggcgtgcattccttggcaagtcttgaacaggcgatagagcattatattgctgggcatgatgatgagtctgtgcaggcgggcaagcttgggcagtatttcaaacatggcttggcgggggtggacaatccaatccaaaaaatacacaacagccacagcaccattaaggggtttttggagcgtgaacgcccagcaggcgagcgaacattgcccaaaatcaaatcagataaaagtcttgaaatgacacagttaagacaactaaaagaactgctagacaacgccctaaatgtggtgcattttgctaagttattaacgaccaaaaccacgctagataaccaagacggcaatttttatggtgagtttggggcattatatgatgagcttgccaagattgccacgctttataacaaagtgcgtgattatctgtcccaaaagccatttagcaccgaaaaatacaaattaaactttggcaacccgacattattaaacggttgggatttgaataaagaaaaagataattttggggttatcttgcaaaaagacggttgttattatttggcgttattggataaagctcataaaaaagtatttgataatgctccaaatacaggcaaaagtgtttatcaaaaaatggtttataaattattgcctggctctaataaaatgctacccaaagtgttttttgccaagagtaatttggattattataacccttctgcagagctactggataaatatgcacaaggcacgcacaaaaaaggcgataattttaatctaaaagattgtcatgcgttgattgatttttttaaggcgagtattaacaaacatccagaatggcaacattttggttttgaattttcgctaaccagtagctatcaggatttaagtgatttttatagagaagttgaaccacaaggttatcaagtaaaatttgtggatattgatgccgattatattgatgagttggttgagcagggtcagttgtatttattccagatttataataaagatttctcgcccaaggctcatggtaaacctaatttacatactttgtattttaaggcgttatttagtgaggataatcttgccaatccaatttataaattaaatggcgaggcggagatattttatcgcaaggcatctttggatatgaatgaaaccaccattcatcgtgcaggcgaggtattagaaaataaaaatcccgataatcccaaagagcgtcaatttgtctatgacatcatcaaagacaaacgttatacccaagataagtttatgctacacgtgcctattaccatgaattttggtgtgcagggtatgacgattaaagaatttaataaaaaagttaatcaaagcatacaacaatatgatgaggtgaatgtgattggcatagaccgtggcgagcgacatctgctatatctgaccgtgattaacagcaaaggtgaaatcttagaacagcgtagtctcaatgacatcatcaccacatcggcaaacggcacacaaatgaccacgccttatcataagatactggacaaaagggagatagaacgcctaaatgctcgtgtcggttggggtgaaattgagaccattaaagagctaaaatcgggctatctaagccatgtggtacatcaaatcagtcagcttatgcttaaatataacgccattgtggtgttggaagatttgaattttgggtttaagcgtggtcgctttaaggtggaaaaacaaatttaccaaaactttgaaaacgccctaatcaaaaaactcaaccatttggtattaaaagacaaggcagataatgagattggctcatacaaaaatgccttgcaactgaccaataattttaccgacctaaaaagcattggcaagcaaacaggctttttattctatgtgcctgcatggaataccagtaaaatagaccctgtaacgggctttgtggatttgttaaaaccacgttatgaaaatatcgctcaatcgcaagcgttttttgataagtttgataagatttgttataacgcagacaagggttattttgaatttcatattgattatgccaaattcactgacaaagccaaaaattctcgccaaatatggacgatttgttcgcatggcgataaacgctatgtgtatgacaaaaccgccaaccaaaataaaggggcgaccattggcattaatgtcaatgatgaattaaaatcgttatttgctcgttatcgcatcaatgacaaacagccaaatctggtcatggatatttgccaaaataacgataaagaatttcataaatcgctaacgtatctgttaaaggcattgcttgcattacgatatagtaatgccagtagtgatgaagattttattttatcgcctgtggcaaatgacaagggtgtgttttttaattcggcattggcagatgatacacagccacaaaatgcggacgccaatggtgcgtaccatatcgcattaaaggggctgtggctattaaacgaattaaaaaacagcgatgatttggataaagtcaaacttgccattgataatcaaacatggctaaacttcgctcaaaaccgctaa

SEQ ID NO: 875-877 - skipped (3 entries)

SEQ ID NO: 878 - DNA, 3774 bp, Sodaliphilus pleomorphus
atgaagtataccgattttacaggcatttatcctgtgtctaagactttaagatttgagctcattccacaaggatctactgtggagaacatgaaacgcgagggcattctgaacaacgatatgcatcgtgccgatagctacaaggaaatgaaaaaattgattgatgagtaccacaaggtatttatcgagcggtgcttgtctgatttctccctgaagtatgacgatacgggaaaacacgattctcttgaggaatattttttctactacgagcaaaagagaaacgataagacaaaaaaaatctttgaggatatccaagtcgctttgcgtaagcaaatttcaaaaaggtttactggcgatactgcgtttaaaagacttttcaagaaagaactcatcaaagaagacttgcccagttttgtaaaaaacgacccagttaagactgaactgataaaggagttttctgatttcaccacctattttcaggaattccacaagaatcgcaaaaacatgtatacatctgatgcgaaatctactgctattgcctaccgcatcatcaacgaaaacttgcccaaattcatcgacaatatcaacgcatttcacattgttgccaaggtgcccgaaatgcaagagcattttaagacaatagccgatgagcttaggagccacttacaggttggagatgacatcgataagatgtttaacctgcaatttttcaacaaagtgctgactcagtcacaactcgctgtatataatgccgttataggaggcaagagcgagggaaacaagaaaatacaaggcatcaatgagtatgttaacctttataaccagcagcataaaaaggcgcgcttgccaatgctgaaactgctgtataagcagatcttgagcgatcgcgttgccatttcatggttacaggatgaatttgataatgaccaggacatgcttgatacaatagaagccttctataacaagcttgatagtaatgaaactggtgtgctgggcgaaggcaagctcaagcaaatactcatgggactggacggctacaatttggatggagtgttcctgcgcaacgatttgcagctctccgaagtttctcagcgcctgtgcggtggctggaatataataaaggatgccatgataagtgacttgaaacgtagtgtacagaagaagaaaaaagaaactggtgccgattttgaagagcgtgtatcaaaacttttctctgcccagaacagtttctcaattgcttatatcaaccagtgccttgggcaggcaggaataaggtgtaagattcaagattactttgcttgtcttggtgcaaaagagggtgaaaacgaagcagagacgactcccgacattttcgatcaaattgctgaggcttaccatggggccgctccaatattaaatgctcggccaagcagtcataatttggctcaggatattgagaaggttaaagcaatcaaagccttgcttgatgcgctcaagcgcttgcagcgatttgtcaagccattgcttggtcgtggcgatgagggcgataaggatagtttcttctatggcgattttatgccgatatgggaagttctcgaccagctcactccgctgtacaacaaggttcgaaaccgaatgactcgtaaaccctattcgcaagaaaaaatcaaacttaatttcgagaatagtacgctgttgaatggctgggacttgaacaaagagcatgataacacaagcgtgattttgcgccgcgaagggttgtactacttaggcatcatgaataaaaactataataaaatatttgatgccaacaatgttgaaaccataggagactgttacgaaaaaatgatttataaacttttgccgggtcccaacaagatgcttcctaaggtgttcttctccaaatcaagagtgcaggaattctctccgagcaagaaaattcttgaaatttgggagagtaagtcttttaagaaaggtgataatttcaatctcgacgattgtcatgctctcatagatttctataaagattctatagcaaagcatcccgactggaataaatttaacttcaagttctctgatactcagtcatatacaaatattagtgatttttatcgtgatgttaatcagcagggttactccctttctttcacaaaagtgagtgttgactatgtcaacaggatggtggacgaaggcaagctatatcttttccaaatctacaataaggacttttcaccccaaagcaagggtacacccaacatgcacaccctatactggcgcatgctctttgatgagcgcaacttgcacaatgttatttataagctcaatggtgaagccgaagtgttttaccgcaaggcaagcctaaggtgcgatcgacctactcaccccgcacatcagcctattacttgcaaaaacgaaaatgactccaaacgtgtgtgtgtgttcgactacgacattattaaaaatcgccgatacaccgttgataaattcatgtttcatgttcctataacaataaattataagtgtactggcagcgacaacatcaatcagcaggtgtgtgattatttgcgctcggcaggcgatgacactcacatcataggcatcgaccgtggagagcgcaatttgctctacttggtgataatcgaccagcatggtactattaaggagcaattttcgcttaacgagattgtcaacgagtacaagggtaatacctattgcaccaattatcataccttacttgaggagaaggaagctggcaacaagaaagcccggcaagactggcaaactattgaaagcataaaagaactcaaagagggctatctgtcgcaggtaatccacaagatctctatgctcatgcagcgttatcatgccattgttgtacttgaagatttgaacggttcgttcatgcgtagcaggcaaaaagtggaaaagcaggtatatcagaaatttgagcacatgctcatcaacaagcttaactacttagtcaacaagcaatatgatgctgccgagccaggaggcttgttgcacgcattgcaactcacgagcagaatggatagttttaaaaagctgggcaagcaaagcggtttccttttctatattccagcatggaatacttcaaagattgatcctgtgactggatttgtcaacctttttgacactcgttactgcaatgaagccaaagctaaggagttctttgaaaaatttgacgacataagctacaatgacgagcgtgattggtttgagttttcttttgattatcgtcattttaccaacaagcctactggaactcgtactcaatggacactatgcacccaagggacacgtgtacgcacttttcgcaatcccgagaaaagcaatcattgggacaatgaggaattcgatctcacacaagcatttaaagacctctttaacaaatatggcatcgatatcgcttcgggacttaaagcccgtatagttaacgggcagctcactaaagaaacctctgcagtcaaagacttctatgagtcgttgcttaagttactaaaactcactttgcagatgcgaaatagtgtcactggtactgacattgattatcttgtatcccctgtggctgataaagatggtatttttttcgacagccgaacttgcggtagccttttacctgccaatgccgacgccaatggagctttcaatatagcacgaaaaggattgatgttgttacgtcagattcaacaaagctcaattgatgcagaaaagatccagctcgctcccattaaaaatgaagattggcttgaattcgctcaggagaaaccatacttgtaa

SEQ ID NO: 879-881 - skipped (3 entries)

SEQ ID NO: 882 - DNA, 3738 bp, Phocaeicola plebeius
atggaaacattttctgggtttacaaatttgtaccctttgtcaaagacattgcggtttagattgattcctgtaggggaaacattgaaatattttattggtagtggaatattggaagaagaccagcatagggctgagagctatgtgaaggtaaaggctattattgatgactatcatagagcttatattgagaattctttatcaggctttgaattacctttggaaagtacgggtaaattcaattctttggaggaatattatttgtatcataatattcgcaataaaacggaagaaattcagaacttgtcatccaaggtcagaactaatctgaggaaacaagtcgtggctcaactaactaagaacgaaatatttaaaagaattgataaaaaagagctgattcagagtgatttgattgattttgttaaaaatgagcctgatgcaaatgagaaaatagcactaatctcagaatttcgtaattttactgtatatttcaaaggttttcatgaaaaccgtagaaatatgtattcagatgaagaaaagtccacgtctatagcctttcgtctgattcatgagaatcttcccaagtttattgataatatggaagtgtttgcaaaaatacagaatacttctatctcggagaattttgatgctatacagaaagaactttgcccggagttggtaaccctttgtgaaatgtttaagttggggtattttaataagactttaagtcagaaacaaatagatgcttataatactgttataggtggtaaaaccacatcagaaggtaaaaagattaaaggtcttaatgaatatattaatctttataaccagcagcataagcaagagaaattacccaagatgaagcttcttttcaagcagatacttagtgatagagaaagtgcgtcatggctgccagagaagtttgagaatgatagtcaggttgtcggtgcaatagtgaatttctggaatactattcatgatacagttcttgcagaaggagggttgaaaacgattattgcttcattgggtagttatggccttgaaggtattttcctaaagaatgatttgcaacttactgatatatcacaaaaggcaacaggtagttggggtaaaatatcttctgagataaagcaaaaaatagaggtgatgaatcctcaaaagaaaaaagagtcttatgagacttatcaagaacgtatagataagatattcaagtcttataaaagtttttctttagcttttataaatgagtgccttcgtggtgagtataagattgaagattattttctcaagttaggggctgtgaatagcagttcgttacagaaagaaaatcatttttcgcatattctcaatacctatacagatgtgaaagaggtgattggcttttactctgaatcgactgacactaaattaatacgagataatggttccattcaaaagataaaactgtttcttgatgcggttaaagacttacaggcttatgtaaaaccattattgggtaatggtgatgaaaccggtaaagatgaaagattttatggcgatttgattgagtattggagtttgcttgacttgattactcctttatataatatggttcgtaattatgtcactcagaagccgtattctgtagataaaataaaaataaatttccagaatcctactttattgaatggctgggaccttaataaagaaacggataatacatctgtaatattgcgtcgtgatggcaaatattatctggccataatgaataacaaatccagaaaagtctttttgaaatatccatcagggacagatagaaattgctatgagaagatggagtataaacttttaccaggtgctaataagatgctacctaaggtcttcttttcaaaatcaaggataaatgaattcatgcctaatgagcgtttgttgtcaaattatgaaaagggcacgcataaaaagtcgggtacttgttttagtttggatgattgtcatactttgatagatttctttaagaagtctttggacaaacatgaggattggaaaaactttggcttcaagttctctgatacttctacatatgaagatatgagtggtttttataaagaagtagagaatcaaggttataaattatcctttaagccgattgatgctacgtatgtggatcagcttgttgatgaaggtaagatttttctgtttcagatttataacaaggatttttctgagcatagcaaaggtacgcctaatatgcataccttgtattggaaaatgttgtttgatgaaacaaatcttggggatgtggtgtataaactaaatggtgaggctgaagtctttttccgtaaggcaagtataaatgtatcacatccaactcatccggctaacatacccataaagaaaaagaatcttaaacataaagatgaagaaagaattcttaaatatgacttgattaaagataagcgttataccgtcgaccagttccagtttcatgtgccaataaccatgaatttcaaggcggatggaaatggaaatataaaccagaaagcgatagactatttacgttcggcatcagatactcatataatagggattgaccgtggtgaacgaaacttgttatatcttgtagtgattgatggaaatggaaaaatctgtgagcaattctctttaaatgaaatagaagttgaatataatggtgaaaagtattcaacaaattaccatgatttgcttaatgtcaaggagaatgaaagaaagcaggcaagacagagttggcaaagtatagctaacataaaagacttgaaagaaggctatttaagtcaggttattcataagatttctgaattgatggtcaaatataatgcgattgtggtgcttgaggatttgaatgctggatttatgcgtggtcgacaaaaggttgaaaagcaggtttatcagaaatttgaaaagaaactcattgagaagttaaattatctcgtattcaagaaacagtcttctgatttgcctggtgggcttatgcatgcttatcagttagctaataaatttgagagttttaatactttaggtaaacaaagcggatttctcttttatatccccgcctggaataccagtaaaatggatccggtaacaggttttgtaaatttgtttgatgtgaagtatgaaagtgttgataaggcaaaaagctttttcagtaagttcgattctataaggtataatgtggaaagagatatgtttgaatggaaattcaattatggtgaattcacgaaaaaagccgaaggaactaaaactgattggactgtttgttcctacggtaatagaattatcacctttagaaatccggataaaaattctcaatgggataataaagaaataaatcttaccgaaaatattaagctgctgtttgaaaggtttggcatcgacttatcttcaaatctgaaagatgagataatgcaacgtacagaaaaagaattctttatcgaacttatatccctatttaagcttgtgctacagatgcgtaatagttggacaggtactgatatagattatctggtatcacctgtatgcaatgaaaacggtgaatttttcgatagcagaaacgtagatgaaacacttccgcaaaatgcggacgcaaacggagcatataacattgcaagaaaaggaatgatacttcttgataagattaagaaaagtaacggtgagaagaagcttgctctatctataactaatagagaatggctttcatttgctcaaggttgttgcaaaaatggatga

SEQ ID NO: 883-885 - skipped (3 entries)

SEQ ID NO: 886 - DNA, 3738 bp, Phocaeicola plebeius
atggaaacattttctggatttacaaatttgtatcctttgtcaaagacattgcggtttagattgattcctgtaggggaaacattgaaacattttattgatagtggaatattggaagaagaccagcatagggctgagagttatgtgaaggtaaaggctattattgatgactatcatagagcttatattgagaattctttatcaggctttgaattacctttggaaagtacgggtaaattcaattctttggaggaatattatttgtatcataatattcgcaataaaacggaagaaattcagaacttgtcatccaaggtcagaactaatctgaggaaacaagtcgtggttcaactaactaagaacgaaatatttaaaagaattgataaaaaagagctgattcagagtgatttgattgattttgttaaaaatgagcctgatgcaaatgagaaaatagcactaatctcagaatttcgtaattttactgtatacttcaaaggttttcatgaaaaccgtagaaatatgtattccgatgaagaaaagtccacgtctatagcctttcgtctgattcatgagaatcttcccaagtttattgataatatggaagtgtttgcaaaaatacagaatacttctatctcggagaattttgatgctatacagaaagaactttgcccggagttggtaaccctttgtgaaatgtttaagttggggtattttaataagactttaagtcagaaacaaatagatgcttataatactgttataggtggtaaaaccacatcagaaggtaaaaagattaaaggtcttaatgaatatattaatctttataaccagcagcataagcaagagaaattacccaagatgaagcttcttttcaagcagatacttagtgatagagaaagtgcgtcatggctgccagagaagtttgagaatgatagtcaggttgtcggtgcaatggtgaatttctggaatactattcatgatacagttcttgcagaaggaggattgaaaacgattattgcttcattgggtagttatggccttgaaggtattttcctaaagaatgatttacaacttactgatatatcacaaaaggcaacaggtagttggagtaaaatatcttctgagataaagcaaaaaatagaggtgatgaatcctcaaaagaaaaaagagtcttatgagagttatcaagaacgtatagataagctattcaagtcttataaaagtttttctttagcttttataaatgagtgccttcgtggtgagtataagattgaagattattttctcaagttaggggctgtgaatagcagttcgttacagaaagaaaatcatttttcgcatattctcaatgcatatacagatgtaaaagaggcgattggcttttactctgaatcgactgacaccaaattaatacaagataatgattccattcaaaagataaaacagttccttgacgcagttaaagacttacaggcttatgtaaaaccattattgggtaatggtgatgaaaccggtaaggatgaaaggttttatggcgatttgattgagtattggagtctgcttgacttgattactcctttatataatatggttcgtaattatgtcactcagaagccgtattctgtagataaaataaaaataaatttccagaatcctactttattgaatggttgggaccttaataaagaaacggataatacatctgtaatattgcgtcgtgatggcaaatattatctggccataatgaataacaaatccagaaaagtctttttgaaatatccatcagggacagatggaaattgctatgagaagatggagtataaacttttaccaggtgctaataagatgctacctaaggtcttcttttcaaaatcaaggataaatgaattcatgcctaatgagcgtttgttgtcaaattatgaaaagggcacgcataaaaagtcgggtatttgttttagtttggatgattgtcatactttgatagatttctttaagaagtctttggacaaacatgaggattggaaaaactttggcttcaagttctctgatacttctacatatgaagatatgagtggtttttataaagaagtagagaatcaaggttataaattatcctttaagccgattgatgctacgtatgtggatcagcttgttgatgaaggtaagatttttctgtttcagatttataacaaggatttttctgagcatagcaaaggtacgcctaatatgcataccttgtattggaaaatgttgtttgatgaaacaaatcttggggatgtggtatataaactaaatggtgaggctgaagtctttttccgtaaggcaagtataaatgtatcacatccaactcatccggctaacatacccataaagaaaaagaatcttaaacataaagatgaagaaagaattcttaaatatgacttgattaaagataagcgttataccgtcgaccagttccagtttcatgtgccaataaccatgaatttcaaggcggatggaaatggaaatataaaccagaaagcgatagactatttatgttcggcatcagatactcatataatagggattgaccgtggtgaacgaaacttgttatatcttgtagtgattgatggaaatggaaaaatctgtgagcaattctctttaaatgaaatagaagttgaatataatggtgaaaagtattcaacaaattaccatgatttgcttaatgtcaaggagaatgaaagaaagcaggcaagacagagctggcaaagtatagctaacataaaagacttgaaagaaggctatttaagtcaggttattcataagatttctgaattgatggtcaaatataatgcgattgtggtgcttgaggatttgaacgctggatttatgcgtggccgacaaaaggttgaaaagcaggtttatcagaaatttgaaaagaaactcattgagaagttaaattatctcgtattcaagaaacagtcttctgatttgcctggtgggcttatgcatgcttatcagttagctaataaatttgagagttttaatgctttaggtaaacaaagcggatttctcttttatatccccgcctggaataccagtaaaatggatccggtaacaggttttgtaaatttgtttgatgtgaagtatgaaagtgttgataaggcaaaaagttttttcagtaagttcgattctatgaggtataatgtggaaagagatatgtttgaatggaaattcaattatggtgaattcacgaaaaaagccgaaggaactaaaactgattggactgtttgttcctacggtaatagaattatcacctttagaaatccggataaaaattctcaatgggataataaagaaataaatcttaccgaaaatattaagctgctgtttgaaaggtttggtatcgacttatcttcaaatctgaaagatgagataatgcaacgtacagaaaaagaattctttatcgaacttatatccctatttaagcttgtgttacagatgcgtaatagttggacaggtactgatatagattatctggtatcacctgtatgcaatgaaaacggtgaattttttgatagcagaaacgtagatgaaacacttccgcaaaatgcggacgcaaacggagcatataacattgcaagaaaaggaatgatacttcttgataagattaagaaaagtaacggtgagaagaagcttgctctatctataactaatagagaatggctttcatttgctcaaggttgttgcaaaaatggatga

SEQ ID NO: 887-889 - skipped (3 entries)

SEQ ID NO: 890 - DNA, 3738 bp, Phocaeicola plebeius
atggaaacattttctgggtttacaaatttgtaccctttgtcaaagacattgcggtttagattgattcctgtaggggaaacattgaaacattttattggtagtggaatattggaagaagaccagcatagggctgagagttatgtgaaggtaaaggctattattgatgactatcatagaacttatattgagaattctttatcaggctttgaattacctttggaaagtacgggtaaattcaattctttggaggaatattatttgtatcataatattcgaaataaaacggaagaaattcagaacttgtcatccaaggtcagaactaatctgaggaaacaagtcgtgactcaactaactaagaacgaaatatttaaaagaattgataaaaaagagctgattcagagtgatttgattgattttgttaaaaatgaacctgatgcaaatgagaaaatagcactaatctcagaatttcgtaattttactgtatacttcaaaggttttcatgaaaaccgtagaaatatgtattcagatgaagaaaagtccacgtctatagcctttcgtctgattcatgagaatcttcccaagtttattgataatatggaagtgtttgcaaaaatacagaatacttctatctcggagaattttgatgctatacagaaagaactttgcccggagttggtaaccctttgtgaaatgtttaagttggggtattttaataagactttaagtcagaaacaaatagatgcttataatactgttataggtggtaaaaccacatcagaaggtaaaaagattaaaggtcttaatgaatatattaatctttataaccaacagcataagcaagagaaattacccaagatgaagcttcttttcaagcagatacttagtgatagagaaagtgcgtcatggctgctagagaagtttgagaatgatagtcaggttgtcggtgcaatggtgaatttctggaatactattcatgatacagttcttgcagaaggaggattgaaaacgattattgcttcattgggtagctatggccttgaaggtattttcctaaagaatgatttacaacttactgatatatcacaaaaggcaacaggtagttggagtaaaatatcttctgagataaagcaaaaaatagaggcgatgaatccccaaaagaaaaaagagtcttatgagagttatcaagaacgtatagataagctattcaagtcttataaaagtttttctttagcttttgtaaacgagtgccttcgtggtgagtataagattgaagattattttcttaagttaggggctgtgaatagcagtttgttacagaaagaaaatcatttttcgcatattctcaatacatatacagatgtaaaagaggtgattggcttttactctgaatcgactgatactaaattaatacaagataatgattccattcaaaagataaaacagttccttgacgcagttaaagacttacaggcttatgtaaaaccattattgggtaatagtgatgaaaccggtaaggatgaaagattttatggtgatttgattgagtattggagtctgcttgacttgattactcctttatataatatggttcgtaattatgtcactcagaagccgtattctgtagataaaataaaaataaatttccagaatcctactttattgaatggttgggaccttaataaagaaatggataatacatctgtgatattgcgtcgtgatggtaaatattatctggccataatgaataacaaatccagaaaagtctttttgaaatatccatcagggacagatagaaattgctatgagaagatggagtataaacttttacctggtgctaataagatgttacctaaggtcttcttttcaaaatcaaggataaatgaattcatgcctaatgagcgtttgttgtcaaattatgaaaagggcacgcataaaaagtcgggtacttgttttagtttggatgattgtcatactttgatagatttctttaaaaagtctttgaacaaacatgaggattggaagaattttggcttcaagttctctgatacttctacttatgaagatatgagtggtttttataaagaagtagagaatcaaggttataaattatcctttaaaccgattgatgctacgtatgtggatcagcttgttgatgaaggtaagatttttctgtttcagatttataacaaggatttttctgagcatagcaaaggtacgcctaatatgcataccttgtattggaaaatgttgtttgatgaaacaaatcttggggatgtggtatataaactaaatggtgaggctgaagtctttttccgtaaggcaagtataaatgtatcacatcccactcatccggctaacatacccataaagaaaaagaatcttaaacataaagatgaagaaagaattcttaaatatgacttgattaaagataagcgttatactgtcgaccagttccagtttcatgtaccaataaccatgaatttcaaggcgaatggaaatggaaatataaaccagaaagcgatagactatttacgttcggcatcagatactcatataatagggattgaccgtggtgaacgaaacttgttatatcttgtagtgattgatggaaatggaaaaatctgtgagcaattctctttaaatgaaatagaagttgaatataatggtgaaaagtattcaacaaattaccatgatttgcttaatgtcaaggagaatgaaagaaaacaggcaagacagagctggcaaagtatagctaacataaaagacttgaaagaaggctatttaagtcaggttattcataagatttctgaattgatggtcaaatataatgcgattgtggtgcttgaggatttgaatgctggatttatgcgtggccgacaaaaggttgaaaagcaggtttatcagaaatttgaaaagaaactcattgagaagttaaattatctcgtattcaagaaacagtcttctgatttgcctggtgggcttatgcatgcttatcagttagcgaataaatttgagagttttaatactttaggtaaacaaagcggatttctcttttatatccccgcctggaataccagtaaaatggatccggtaacaggttttgtaaatttgtttgatgtgaagtatgaaagtgttgataaagcaaaaagttttttcagtaagttcgattctataaggtataatgtggaaagagatatgtttgaatggaaattcaattatgatgaattcacgaaaaaagccgagggaaccaaaactgattggactgtttgttcctacggtaatcgaattatcacttttagaaatccggataaaaattctcaatgggataataaagaaataaatcttaccgaaaatattaagctgctgtttgaaaggtttggcatcgacttatcttcaaatctgaaagatgagataatggaacgtacagaaaaagaattctttatcgaactgatatccctatttaagcttgtgctacagatgcgtaatagttggacaggtactgatatagattatctggtatcacctgtatgcaatgaaaatggtgaatttttcgatagcagaaatgtagatgaaacacttccgcaaaatgcagacgcaaacggagcatataacattgcaagaaaaggaatgatacttcttgataagattaagaaaaataacggtgagaagaagcttactctgtctataactaatagagaatggctttcatttgctcaaggttgttgcaaaaatggatga

SEQ ID NO: 891-893 - skipped (3 entries)

SEQ ID NO: 894 - DNA, 3786 bp, Moraxella lacunata
atgttatttcaagactttactcatttatatcccctatcaaaaaccgtgcgttttgaattaaagcccattggcaagacattagagcatatccatgccaaaaactttttgagccaagataagaccatggcggacatgtaccaaaaggtgaaggcgatactggacgattatcatcgtgattttatcgctgatatgatgggcgaagttaagctaactaagctggcagaattttgtgatgtgtatttaaaatttagaaaaaatcccaaagacgatggattgcaaaaacagctaaaggacttgcaagcagttttaagaaaagagattgtgaagcccatcggtaatggcggaaaatacaaggtgggttatgaccgcttatttggggcaaagctctttaaggacggcaaagagcttggtgatttggcgaaatttgtcatcgcccaagagagcgagtcatcacccaagcttccccaaattgcccattttgagaagtttagcacctactttactggctttcatgacaaccgcaaaaacatgtacagcagtgatgataagcataccgccattgcctatcgtctgattcatgaaaatttgccacgttttatcgataatctacaaatattggcaaccatcaaacaaaagcattcggcattgtatgatcagattgcaagtgaactgactgcaagtggtttggatgtgtcgctagcaagtcatctgggcggctatcacaagcttttaacccaagagggtatcacggcttataataggataataggtgaagtgaatagttatacgaataagcataatcaaatttgccacaaatccgaacgtatcgccaaattacgccccctgcacaaacaaatcctaagcgacggcatgggcgtgtcgtttttgccaagcaaatttgccgatgatagcgagatgtgtcaagcggtcaatgagttttaccgccattatgctgatgtttttgctaaggtgcaaagcttatttgatagatttgatgactatcaaaaggacggcatttatgttgaacataaaaatctaaatgagctatctaagcgagcatttggtgattttgggtttttaaaacgattcttagaggagtattatgcagatgtgattgacccagagtttaatgagaaattcgccaagaccgagcctgatagcgacgaacaaaaaaaactggcaggagaaaaagacaaattcgttaaaggcgtacattccttggcaagtcttgaacaggtgattgagtattataccgctgggtatgatgatgagtctgtacaagcagacaaacttgggcagtatttcaaacaccgtctggcaggcgtggataatccaatccaaaaaatacacaacagtcacagtaccattaaggggtttttggagcgtgaacgtccagcaggcgagcgagcattgcccaaaattaagtcagataaaagtcctgaaatgacacaattaagacaactaaaagagctactagacaacgccttaaacgtggtgcattttgctaagctggtgtcgaccgaaaccgtattagacactcgaagtgataaattttatggcgaatttagacctttatatgttgagcttgccaagattaccacactttataacaaagtgcgtgattatctgtcgcaaaagccatttagcaccgaaaaatataaattaaactttggcaatccgacattattaaacggttgggatttgaataaagaaaaagataattttggggttatcttacaaaaagacggctgttattatttggcgttattggataaagctcataaaaaagtatttgataatgctccaaatacaggtaaaagcgtttatcaaaaaatggtttataagcaaatagcaaatgctcgacgggacttagcttgtttattgattattaatggtaaggtagttagaaaaacaaaaggattggatgatttacgtgagaaatatttaccatacgatatttataaaatttatcaatccgagagctataaggttttatcgccaaattttaatcatcaagacttggttaaatatattgattataacaaaattttagcatcgggatattttgagtattttgattttaggtttaaagaaagctctgaatataagagctataaagaatttttggatgatgtagataactgtggttataaaataagtttttgtaatataaacgccgattatattgatgagttggttgagcagggtcagttgtatttattccagatttataataaagatttctcgcccaaggctcacggtaagcccaatttgcatactttgtattttaaggcattatttagtgaagataatcttgccaatccgatttataagttaaatggcgaggcacagatattttatcgcaaggcgtctttggatatgaatgaaaccaccattcatcgtgcaggcgaggtattagaaaataaaaatcccgataatcccaaacagcgtcaatttgtctatgacatcatcaaagacaaacgttatacccaagataagtttatgctacatgtgcctattaccatgaattttggtgtgcagggcatgacgattgaaggatttaataaaaaagttaatcaaagcatacaacaatatgatgatgtgaatgtgattggcatagaccgtggcgagcgacatctgctatatctgaccgtgattaacagcaaaggtgaaatcttagaacagcgtagtctcaatgacatcatcaccacatcagcaaacggcacacaaatgaccacgccttatcataaaatcctaaataaaaagaaagaagggcgtttgcaggctcgtaaggattggggtgagattgaaaccattaaagagctaaaagcaggctatctaagccatgtggtacatcaaatcagccagcttatgcttaaatataatgccattgtggtgttggaagatttgaattttggatttaagcgtggtcgcctgaaagtggagaatcaggtttatcaaaactttgaaaacgccttaatcaaaaagctaaaccatttggtattaaaagataagacagatgatgagattggctcatataaaaatgccctgcaattgaccaataattttactgacctaaaaagcattggcaaacaaacgggatttttattctatgtgcctgcacggaataccagtaaaatagaccctgaaacgggctttgtggatttgttaaaaccacgttatgaaaatatcactcagtcgcaagcgttttttggtaaatttgataagatttgttataacacagataagggttattttgaatttcatattgattatgccaaattcactgacgaagccaaaaactctcgccaaacatgggtcatttgctcgcatggcgataaacgctatgtgtataacaaaaccgccaaccaaaataaaggggcgaccaagggtattaatgttaatgatgaattaaaatcgctatttgcttgtcatcacatcaatgacaaacagccaaatctggtcatggatatttgccaaaataacgataaagaatttcataaatcgctaatgtatctgttaaaggcattgcttgcattacgatatagtaacgccaatagcgatgaagattttattttatcgcctgtggcaaatgatgagggtgtgttttttaattcggcattggcggatgatacacagccacaaaatgcggacgccaatggggcatatcatatcgcattaaagggtttgtgggtactagaacaaatcaaaaacagcgatgatttggataaagttgatctcgaaattaaagatgacgaatggcgaaactttgctcaaaaccgctaa

SEQ ID NO: 895-897 - skipped (3 entries)

SEQ ID NO: 898 - DNA, 3828 bp, Unknown
  Description of Unknown: Lachnospiraceae bacterium sequence
atgggtaaaaatcaaaattttcaggaatttattggggtatcaccacttcaaaagactttaagaaacgaattgatcccaacagaaacaacaaaaaagaatattactcagcttgatcttttgacggaggatgaaatccgtgcgcaaaatcgagagaagctgaaagagatgatggatgactactaccgggatgtgattgatagcactttgcatgcgggtatagctgttgattggagctatttattttcgtgtatgcgaaatcatctaagggagaattccaaagagtcaaagcgggaattggaacgaacacaggattctattcgttcacaaatctataataagtttgctgaacgagcggattttaaggatatgtttggagcatcgataataacaaaattacttccgacatatataaaacagaatccagaatattccgagcggtatgacgagagcatggaaattttgaaactgtatggaaaattcacaacatcgttgaccgattactttgagacaagaaagaatatcttttctaaagagaaaatatcttctgccgttggatatcgaatcgtagaggaaaatgctgagatcttcttgcagaatcagaatgcttacgacagaatctgtaagatagcgggactggatttacatggattggataatgaaataacagcatatgttgatggaaaaacattaaaagaagtatgttcggatgaaggatttgcaaaggctattacacaagaagggattgatcgctacaacgaggcaatcggtgcagtaaatcaatatatgaatctgttatgccagaagaataaggcattaaaaccgggacaatttaagatgaagcggttacataaacagattctttgcaaaggaacaacctctttcgatattccaaagaaatttgaaaatgataaacaggtgtatgacgcagttaattcttttacagagatagtaatgaagaataatgatttgaagcgactgttaaatattacacagaatgtaaatgattatgacatgaataaaatctatgtagcagccgatgcatatagtacgatttcacagtttatcagtaaaaaatggaatctgattgaagaatgtttgctggattattatagcgataatttgccgggaaaaggaaatgcgaaagaaaacaaagttaaaaaggcggtaaaggaagaaacgtatcgcagtgtttcacagttgaatgaacttattgagaaatattatgtggaaaagacaggacagtcagtatggaaagtggaaagttatatttcgaggctggcagaaacgattacattggaattgtgtcatgagatagaaaacgatgagaagcataatctgattgaagatgatgacaagatatccaagatcaaggaactgttggatatgtacatggatgcatttcatattataaaagtgttccgggtgaatgaagtattgaatttcgatgaaaccttttattcggagatggatgagatttatcaggatatgcaggaaatcgttccattatacaatcatgttcgaaactatgttacacagaaaccatataaacaggagaaatatcgtttatatttcaacactccaacattggcaaatggctggtccaagaataaggaatatgataacaacgctattatcttaatgcgagatgataaatattatttaggtattctgaatgcaaaaaagaaaccatcgaaacaaactatggcgggcaaagaggactgtttagaacatgcgtatgcaaagatgaattattatttgttgccgggtgcgaacaagatgcttccaaaagtatttttatctaagaaaggaatacaggactatcacccatcatcatatattgttgaaggatataatgaaaagaaacatattaaaggttccaagaattttgatatccggttttgtagggatttgattgactacttcaaggaatgcattaaaaaacatccggattggaataagtttaactttgaattttctgcgacagaaacatatgaggatatcagtgtcttttatcgcgaagttgaaaagcaaggatatcgcgtagagtggacgtatatcaatagtgaagatattcagaaactggaagaagatggacagttgtttttatttcagatatataacaaagattttgctgtgggaagtacaggtaaaccaaatcttcatacattgtatctgaaaaatctgttcagcgaagaaaatttgcgggacattgtattaaaactaaatggggaagcagaaatattcttccgtaaatcaagtgttcaaaaaccggtgattcataagtgcggcagtattttagtcaatcgtacctatgagattaccgagagtggaacaacacgggtacaatcaattccggaaagtgaatacatggaattatatcgctactttaatagtgaaaagcagatagaattatcagatgaggcaaaaaaatatttggacaaggtgcaatgtaataaggcaaagacagatattgtgaaagactaccgatacaccatggacaagttttttattcatcttccgattacgattaattttaaggttgataagggtaacaatgttaatgccattgcacagcaatatattgcagagcaggaagatttgcatgtgataggaatcgatagaggagaacggaatctgatttacgtttctgtaattgacatgtatggcagaattttagagcagaaatcctttaaccttgtggaacaggtatcgtcgcagggaacgaagcgatattacgattacaaagaaaaattacagaaccgggaagaggaacgggataaagcaagaaagagttggaagacaatcggcaagattaaggaattaaaagaggggtatctgtcgtcagtaattcatgagattgcacagatggtcgtaaagtataacgcaatcattgcaatggaagatttgaattatggatttaagcggggaagattcaaagtagagcgccaggtatatcagaaatttgaaacgatgttgatcagtaagttgaattatctggcagataaatctcaggctgtggatgaaccgggaggtatattacggggatatcagatgacttatgtgccggataatattaagaatgttggaagacaatgtggaataatcttttatgtgccggcagcatatacctccaagattgatccgacaaccggatttatcaatgcatttaagcgggatgtggtatcaacaaatgatgcaaaagagaatttcttgatgaagtttgattctattcagtacgatatagaaaaaggcttatttaagttttcatttgattacaaaaattttgccacacataaacttacacttgcgaagacaaaatgggacgtatatacaaatggaactcgaatacaaaacatgaaagttgaaggacattggctttcaatggaagttgaacttacaacgaaaatgaaagagttgctggatgactcgcatattccatatgaagaaggacagaatatattggatgatttgcgggagatgaaagatataacaaccattgtgaatggtatattggaaatcttctggttgacagtccagcttcggaatagcaggatagataatccggattacgatagaattatctcaccggtactgaataatgatggagaattttttgattctgatgaatataattcatatattgatgcgcaaaaggcaccgttaccgatagatgccgatgcaaatggcgcattttgcattgcattaaaaggaatgtatactgccaatcagatcaaagaaaactgggttgaaggggagaaacttccggcggattgcttgaagatcgaacatgcgagttggttagcatttatgcaaggagaaaggggatag

SEQ ID NO: 899-901 - skipped (3 entries)

SEQ ID NO: 902 - DNA, 3786 bp, Moraxella sp.
atgaatacaagtttattttcatcattcactcgccaatatccagttaccaaaaccttgcgttttgaattaaaaccaatgggtgcgacattggggcacattcagcaaaaaggttttttacacaaagatgaagagctggcaaaaatttacaaaaaaatcaaagaactgcttgatgagtatcatcgggcgtttattgcagatacgctgggcgatgctcagcttgtgggcttggatgatttttatgcagattatcaagcactcaaacaagacagtaaaaacagtcatctaaaagataagctcaccaaaacccaagacaatttacgcaaacaaatcaccaaaaattttgaaaaaacaccacagcttaaagaacgctataagcgtttgtttactaaggagctgtttaaagctggtaaggataaaggagatttggaaaaatggctgataaatcatgacagtgagccaaataaggcagaaaaaatctcatggattcatcaatttgaaaattttaccacctattttcaaggattttatgaaaatcgcaaaaatatgtacagtgatgaagtcaaacatactgccattgcttatcgtttaatccatgaaaatttgccacgctttgttgataatatacaagttttatccaaaatcaaatcggattatcctgatttatatcacgaattgaatcatttggacagtcgcacgattgattttgctgattttaagtttgatgatatgttacagatggatttttatcatcatctgcttatccaatcaggcatcaccgcttataatacgcttttgggcggtaaagtattagaaggtggtaaaaagttgcaaggcatcaatgagttaataaatctatatggtcaaaaacataaaattaagattgcaaaattaaagcctttgcacaaacaaatattaagtgatggacaaagcgtctcatttttgcccaaaaagtttgataatgattatgaattgtgccaaactgtcaatcatttttatcgtgaatatgtggctatttttgatgagctggtggttttatttcaaaaattttatgattatgacaaagacaacatatatatcaaccatcaacagctcaatcaactatcgcatgagttatttgctgattttaggttattatcacgtgcgttggacttttattattgtcagataattgatggtgattttaataataaaatcaacaacgccaaaagccaaaatgccaaagaaaaattattaaaagaaaaagagcgatacaccaaatcaaatcatagcatcaatgaattgcaaaaggcaatcaaccactatgccagtcatcatgaagacacagaagttaaagtcattagtgattatttttcagcgacaaacattcgtaatatgattgatggcattcatcatcattttagtacaatcaaaggttttttggaaaaggataataaccaaggcgagagttatctgcccaaacaaaaaaacagcaatgacgttaaaaatttaaaattatttttagatggtgttttgcgactgattcattttatcaaacctttggcattaaaatcagatgataccctagaaaaagaagagcatttttatggggagtttatgcctttgtatgataaattggtaatgtttacgctgctgtataataaagtgcgtgattatattagtcaaaaaccctataatgatgaaaaaatcaaactcaactttggcaattcaactttattaaatggttgggatgtcaataaagaaaaagataattttggggtgatattatgcaaagagggtttgtattatttggcgattttagataaatcccacaaaaaagtctttgataatgcaccaaaagcaaccagtagccacacatatcaaaagatggtatataagctactgccaggacctaataaaatgctgcccaaagtgttttttgcaaaaagtaatattggttattatcagccatcggcacaattattagaaaactatgaaaaaggcacacacaaaaaaggcagtaattttagtttaacagactgtcatcatttgattgatttttttaaatccagcattgccaagcatccagagtggaaagagtttggttttagattttctgacactcacacttatcaggatttaagtgatttttataaagagatagagccgcaatcttataaagttaagtttattgatattgatgctgattatattgatgatttggttgaaaaaggtcaattatatctgtttcaattatacaataaagatttttcaaagcaatcttatggtaaaccaaatctgcacaccttatattttaagtcattgtttagtgatgataatctcaaaaatccgatttataaactcaatggcgaagctgagatattttatcgccgtgcttcattgagtgtgtctgatacgaccattcatcaagcaggagaaatattaacacccaaaaatcccaataatacccataatcgcacattaagttatgatgtgattaaaaataaacgctatacaacagataagttttttctgcacataccgattaccatgaactttggtatagaaaatacaggatttaaagcatttaatcatcaagtcaataccactttaaaaaacgctgataaaaaagatgtgcatatcatcggtattgaccgtggagaaagacatttgttgtatgtcagcgtgattgatggcgatggtcgtattgtggagcagcgaacgttaaatgatattgtatccatttctaataatggcatgagcatgagtacgccgtatcatcagatattggataacagagaaaaagagcgtttggcggctcgcaccgattggggggatattaaaaatatcaaagaattaaaggcagggtatttaagtcatgtggtgcatgaagtggtgcagatgatgttaaaatataatgccatgattgttttggaagatttaaattttggttttaaacatggtcgctttaaggtggaaaagcaagtttatcaaaattttgaaaatgcattgattaaaaaattaaattatttggtattaaaaaacgctgataatcaccagctaggttctgtgcgtaaggctttgcaattaaccaataattttaccgacataaaaagtattggcaaacaaacagggtttattttttatgtgccagcatggaataccagtaaaatagacccaaccacaggttttgtggatttgttaaaaccccgttatgaaaatatggcacaggctcaaagttttatcagcaggtttaaaaagattgcttataatcatcagcttgattattttgaatttgagtttgattatgccgatttttatcaaaaaacgatagataaaaaacgtatttggactttatgcacttatggtgatgtgcgttattattatgaccataaaactaaagaaacaaagaccgttaatattaccaaagagttaaaatcattgttggataagcatgatttaagttatcaaaatggtcataatttggtagatgagctggcaaattctcacgacaagtcattattaagtggcgtgatgtatttattaaaagttttgttggcattaagatatagtcatgctcaaaaaaatgaagattttattttatcccctgtgatgaataaagatggtgtgttttttgacagtagatttgctgatgatgtgttgccaaataatgctgatgcaaatggtgcttatcatattgctttaaagggattatgggtgctcaatcaaatccaatctgccgataatatggataagattgatttgagcatctctaatgagcagtggctacactttacacaaagccgctaa

SEQ ID NO: 903 - skipped

SEQ ID NO: 904 - DNA, 3738 bp, Ruminococcus sp.
atgcaagagcataaaaaaatatcgcatcttacacacagaaattcagttcaaaaaacaattaggatgcaactgaatcctgtaggtaaaacaatggattattttcaagcaaagcaaattcttgagaatgatgaaaagcttaaagaggactatcagaaaatcaaggaaatagcagacaggttttacagaaatttaaatgaggatgtactttcaaaaaccgggttagataaattaaaagattatgctgaaatttactatcactgtaatacggatgcagaccgaaaaagacttgatgaatgtgcatcggaattaaggaaagaaatcgtcaaaaattttaagaatagagatgagtataacaaactattcaataaaaagatgattgagatagttcttccccagcatcttaaaaatgaggacgaaaaggaagttgtagcctcatttaaaaatttcacaacatactttacaggtttcttcactaacagaaaaaatatgtattcggacggagaagaatccacggcaatcgcatatagatgcattaacgaaaatttgcctaagcatcttgacaatgtcaaggcctttgaaaaagcaatttctaagctatccaaaaacgcagttgatgatttagataccacttattccggcttatgcggtacaaatttgtatgatgtttttacagttgattattttaactttttgcttccacaatccggaattaccgaatataataaaatcatcggcggttacacaacaagcgacggtacaaaagttaagggtattaacgaatatataaatttgtacaatcaacaagtatccaaacggtataaaattcctaatcttaaaattttgtataaacaaattttaagtgagagtgaaaaggtatcattcataccgccaaagtttgaagatgacaacgaacttttatcggctgtttcagagttttacgcaaacgacgaaacctttgacgggatgccattaaaaaaagcaattgatgaaacaaagctattattcggcaatttagataattcctctcttaatggaatttacattcaaaatgaccgatccgtgacaaatctgtcaaacagtatgttcggttcttggtcagtaatagaagatttatggaacaaaaattatgactccgttaattcaaacagcagaatcaaagatattcaaaagcgtgaagacaaaagaaaaaaagcatacaaagcagaaaagaaactttcactttcatttttacaggttttgatttccaattccgaaaatgatgaaatcagagaaaagtctatcgtagattactacaagacttctttaatgcaacttaccgacaatttatcagacaaatacaaagaagcagcacctctgttcaacgaaagttacgctaatgaaaaaggtttgaaaaatgacgataaatctatttcattaattaaaaattttcttgatgccataaaagaaattgaaaaattcatcaagcctttgtccgaaactaatattacaggtgagaaaaatgatttgttttacagtcagttcacaccattacttgataatatcagcagaatagacatattatatgataaggtcagaaactatgttacacaaaaaccgttttcaaccgataaaatcaaacttaactttggcaattcacagctattaaacggctgggatcgaaacaaagaaaaagactgcggtgccgtttggctttgtaaagatgaaaagtattatcttgcaatcatagataaaagtaataatagtattttggaaaatattgattttcaagactgcgatgaaagcgattgttatgaaaagataatttacaagcttctccccggtccaaataaaatgcttccaaaagttttcttttcagaaaagtgcaagaaacttttgtcaccgtcagacgaaatacttaaaattcgtaaaaacggcactttcaaaaaaggtgataagttcagccttgatgattgccataagttaattgatttctacaaagaatcattcaaaaagtacccaaattggttaatttataactttaaattcaaaaaaacaaacgaatataatgatatcagcgaattttataatgatgttgcttcacagggatataatatttcaaaaatgaaaatcccgacatcatttattgacaaacttgtagatgaaggaaaaatctatcttttccaactctacaacaaagacttttcaccgcatagcaagggtactcctaatctgcatacactttattttaaaatgttgtttgatgaaagaaatcttgaagatgtggtgtacaagcttaacggtgaggcagaaatgttttatcgtcctgcaagtataaaatatgacaaaccaactcatcccaaaaacacaccgataaaaaataaaaatacactcaatgataaaagagcaagcacttttccttatgacttaatcaaagataaacgctacactaagtggcagttttcacttcacttccctattaccatgaattttaaagctccggatagggcaatgatcaatgatgatgtcagaaatctgctgaaatcctgcaacaacaatttcatcataggaattgacagaggcgaaagaaacttgctttatgtcagcataattgacagcaacggtgctataatatatcagcactcactcaatattatcggaaacaagtttaaaggaaaaacatacgaaactaactaccgggaaaaacttgaaacaagagaaaaagagcgtacggaacagcgccgtaactggaaagcaattgagagtataaaagaactcaaagagggctatatcagtcaggctgtgcatgttatatgtcagcttgttgtcaagtacgatgcaatcatcgttatggaaaagctgactgacggattcaaacgaggcagaacaaagtttgaaaaacaggtttatcagaaatttgaaaaaatgctgattgacaaacttaattactatgttgacaaaaagcttgatcccgatgaagaaggcggtttacttcatgcctaccagcttacgaacaagcttgagagctttgataagcttggcatgcaaagcggttttattttctatgttcgtcctgattttacaagcaaaattgatcccgttaccggctttgtaaatttgttgtatcctcgatacgaaaacattgacaaagccaaagatatgatttcaagatttgacgatataagatacaatgccggcgaggacttttttgaatttgacattgattacgataagtttccaaagactgcgtctgactatcgcaagaagtggacaatctgtactaacggcgaaaggattgaagctttcagaaatcccgcaagcaataacgaatggagttatcgtacaataattcttgcagaaaaatttaaagaattatttgataacaattctataaattatcgtgattctgacaatttgaaagctgaaattctttcacagacaaagggcaaattttttgaggatttcttcaaattattaagacttaccctacagatgcgaaacagtaaccctgaaacaggcgaggaccgtattctttctcccgtcaaggacaaaaacggtaatttttacgacagttcaaaatatgacgaaaagagcaatcttccgtgtgatgccgatgcaaacggtgcgtacaacattgcccgcaaaggtttgtggattgttgaacaattcaaaaaatccgataatgtttcaactgtcgaaccggtaatccacaatgacaaatggctgaaatttgttcaggagaatgatatggcgaataattaa

SEQ ID NO: 905 - skipped

SEQ ID NO: 906 - DNA, 3867 bp, Coprococcus sp.
atggtaggtaataaaatatcaaattcgtttgattcgtttactggaatcaacgcattaagtaaaacgttaagaaatgagttaattccatcagattatactaagagacatattgctgagagtgattttattgcggctgatacaaacaaaaatgaagatcagtatgtagcaaaagaaatgatggatgattattatcgcgattttataagtaaggttctagataatttacatgatatagaatggaaaaatttgtttgaattaatgcataaagcgaaaatagataaaagtgatgcaacttcaaaagagttgataaaaattcaggatatgcttcgtaaaaaaataggaaaaaaattctctcaagatcctgaatataaagtcatgctcagtgctggtatgataacaaagattttaccaaaatatatattggagaaatatgaaactgatagagaagacagattagaagcaataaaaagattttacggattcacagtttattttaaagaattttgggcaagtagacaaaatgtattttctgataaggcaatagcgtcatctatatcatatagaatcatacacgagaatgccaaaatatatatggataacctggatgcttataatagaataaaacagattgcttgtgaagaaattgagaagattgaagaagaggcatatgattttctgcaaggtgaccagttagatgtggtatataccgaagaagcatatggacgatttatatcccagagtggaatagatttatataataatatatgtggggttattaatgctcatatgaatttatattgccagagcaaaaaatgctccagatcaaagtttaaaatgcaaaaattacataaacagattttatgtaaagcagaaaccgggtttgaaattccattaggctttcaagatgatgcgcaagtgataaatgcgattaattcatttaatgctctaataaaagaaaaaaatattatatcacgtctcagaactatagggaaaagcatatctttatatgacgtaaataagatatatatttcatctaaagcgttcgagaatgtctctgtatacattgatcataaatgggatgtgatagcttcaagcttgtataagtatttctcggaaattgtcaaaggaaataaagacaacagggaagaaaagattcagaaggaaattaagaaagtaaagagctgtagtctgggtgatttgcagagactggttaattcatattataaaatagatagcacatgtttggagcatgaagtaactgaatttgttactaaaataatagatgagatagataactttcaaattacggattttaaatttaacgacaaaattagcttgattcaaaatgaacagattgtcatggatataaaaacatatcttgataaatatatgagtatttatcattggatgaaatcgtttgtgattgatgagctagttgataaggatatggagttttattcagaacttgatgaacttaatgaggatatgtcggaaattgtgaatttatataacaaagtgcgtaactatgttacacagaagccttatagtcaggaaaagataaaattgaacttcggatcaccgactcttgccgatggatggtcgaaatcaaaggaatttgataacaatgctattatattgattcgtgatgaaaaaatatatttggcaatatttaacccaagaaataaaccagctaagactgttatatcaggacacgatgtttgcaattctgaaacagattataagaaaatgaattattatttgctccctggggcaagtaagactttaccacatgtgtttattaagtctagattgtggaatgaatcacatggaatacctgatgaaatattgcggggatatgagttgggtaaacacttgaaatcatcggtaaattttgatgtagaattctgctggaagctaattgattattataaagaatgtataagctgttatccaaattataaggcgtataattttaaatttgctgatacagaatcgtacaatgatatatcagaattctatagagaagtggagtgtcagggatataagattgactggacatatataagttcagaagatgtagaacaacttgatcgtgatggtcaaatatatctgtttcaaatctataataaagactttgcaccgaatagtaaaggaatggataatcttcatacgaagtacctcaaaaatatatttagcgaagacaatcttaaaaacatagttataaaattgaacggagaggcagaattattttatagaaaatcaagtgtcaagaaaaaagtagaacataaaaagggtacgattttagtcaataaaacatataaggttgaggataacactgaaaacagtaaagaaaaaagagttattattgaatcagtaccagatgattgctatatggaacttgttgattattggagaaatggtggtatcggaattctttcagacaaagctgttcaatataaggacaaagtatctcattatgaagctactatggatatagtcaaggatcgcaggtatacagtagataagttttttatacatttgcctataactatcaatttcaaagcagatggaagaattaatataaatgaaaaggtactcaagtatatagcggaaaatgatgagcttcatgtgattggaattgatagaggagaaagaaatctcctttatgtgtcagtaattaataaaaagggaaagattgttgagcagaagtctttcaatatgatagaaagctatgaaactgtaacaaatatagttagaagatataattataaagacaaactggtcaacaaagaaagtgcccggacagatgcgagaaaaaattggaaagaaattggaaagataaaagaaataaaagagggatacttgtcacaggtaattcatgaaatatcgaagatggtgttgaaatataatgcaatcattgttatggaagatctaaattatggatttaaacgaggtaggtttagggttgaacgtcaggtataccagaaatttgagaatatgttgatatctaaactggcatacttggtagataaaagtcgaaaagccgatgaaccaggaggtgtactaagagggtatcagcttacgtatattccagattctttagagaaacttggtagccagtgtggaatcatattctatgtacctgctgcgtatacatctaagattgatccgttaacaggctttgtaaatgtattcaattttagagaatattctaattttgaaacaaaattggattttgttagatcattagacagtatacgatatgatacagagaagaaattgttttcaatatcatttgattatgacaactttaaaacacataataccactctggcaaaaacgaagtgggttatatatttacgaggcgagcgtataaaaaaggaacatacatcttacgggtggaaggatgatgtttggaatgtggaaagtagaattaaagacttgtttgacagttcacatatgaaatacgatgatggacataatttaattgaagatattcttgaattagaatcgagtgtacagaagaagctgatcaatgaattgatagaaataataaggttgactgttcaacttcgtaacagtaagtcagagagatacgataggacagaagctgaatacgacagaatagtatcgccagttatggatgaaaatggacggttttatgattcggaaaattatattttcaatgaagaaacagagttaccaaaggatgcagatgctaatggtgcatattgcattgcattaaaaggtctgtacaatgtcatagccataaagaataactggaaagaaggagagaaattcaacagaaaattgttaagtctaaataattataactggttcgattttatacaaaatagaaggttttaa

SEQ ID NO: 907-909 - skipped (3 entries)

SEQ ID NO: 910 - DNA, 3867 bp, Coprococcus sp.
atggtaggtaataaaatatcaaattcgtttgattcgtttactggaatcaacgcattaagtaaaacgttaagaaatgagttaattccatcagattatactaagagacatattgctgagagtgattttattgcggctgatacaaacaaaaatgaagatcagtatgtagcaaaagaaatgatggatgattattatcgcgattttataagtaaggttctagataatttacatgatatagaatggaaaaatttgtttgaattaatgcataaagcgaaaatagataaaagtgatgcaacttcaaaagagttgataaaaattcaggatatgcttcgtaaaaaaataggaaaaaaattctctcaagatcctgaatataaagtcatgctcagtgctggtatgataacaaagattttaccaaaatatatattggagaaatatgaaactgatagagaagacagattagaagcaataaaaagattttacggattcacagtttattttaaagaattttgggcaagtagacaaaatgtattttctgataaggcaatagcgtcatctatatcatatagaatcatacacgagaatgccaaaatatatatggataacctggatgcttataatagaataaaacagattgcttgtgaagaaattgagaagattgaagaagaggcatatgtttttctgcaaggtgaccagttagatgtggtatataccgaagaagcatatggacgatttatatcccagagtggaatagatttatataataatatatgtggggttattaatgctcatatgaatttatattgccagagcaaaaaatgctccagatcaaagtttaaaatgcaaaaattacataaacagattttatgtaaagcagaaaccgggtttgaaattccattaggctttcaagatgatgcgcaagtgataaatgcgattaattcatttaatgctctaataaaagaaaaaaatattatatcacgtctcagaactatagggaaaagcatatctttatatgacgtaaataagatatatatttcatctaaagcgttcgagaatgtatctgtatacattgatcataaatgggatgtgatagcttcaagcttgtataagtatttctcggaaattgtcaaaggaaataaagacaacagggaagaaaagattcagaaggaaattaagaaagtaaagagctgtagtctgggtgatttgcagagactggttaattcatattataaaatagatagcacatgtttggagcatgaagtaactgaatttgttactaaaataatagatgggatagataactttcaaattacggattttaaatttaacgacaaaattagcttgattcaaaatgaacagattgtcatggatataaaaacatatcttgataaatatatgagtatttatcattggatgaaatcgtttgtgattgatgagctagttgataaggatatggagttttattcagaacttgatgaacttaatgaggatatgtcggaaattgtgaatttatataacaaagtgcgtaactatgttacacagaagccttatagtcaggaaaagataaaattgaacttcggatcaccgactcttgccgatggatggtcgaaatcaaaggaatttgataacaatgctattatattgattcgtgatgaaaaaatatatttggcaatatttaacccaagaaataaaccagctaagactgttatatcaggacacgatgtttgcaattctgaaacagattataagaaaatgaattattatttgctccctggggcaagtaagactttaccacatgtgtttattaagtctagattgtggaatgaatcacatggaatacctgatgaaatactgcggggatatgagttgggtaaacacttgaaatcatcggtaaattttgatgtagaattctgctggaagctaattgattattataaagaatgtataagctgttatccaaattataaggcgtataattttaaatttgctgatacagaatcgtacaatgatatatcagaattctatagagaagtggagtgtcagggatataagattgactggacatatataagttcagaagatgtagaacaacttgatcgtgatggtcaaatatatctgtttcaaatctataataaagactttgcaccgaatagtaaaggaatggataatcttcatacgaagtacctcaaaaatatatttagcgaagacaatcttaaaaacatagttataaaattgaacggagaggcagaattattttatagaaaatcaagtgtcaagaaaaaagtagaacataaaaagggtacgattttagtcaataaaacatataaggttgaggataacactgaaaacagtaaagaaaaaagagttattattgaatcagtaccagatgattgctatatggaacttgttgattattggagaaatggtggtatcggaattctttcagacaaagctgttcaatataaggacaaagtatctcattatgaagctactatggatatagtcaaggatcgcaggtatacagtagataagttttttatacatttgcctataactatcaatttcaaagcagatggaagaattaatataaatgaaaaggtactcaagtatatagcggaaaatgatgagcttcatgtgattggaattgatagaggagaaagaaatctcctttatgtgtcagtaattaataaaaagggaaagattgttgagcagaagtctttcaatatgatagaaagctatgaaactgtaacaaatatagttagaagatataattataaagacaaactggtcaacaaagaaagtgcccggacagatgcgagaaaaaattggaaagaaattggaaagataaaagaaataaaagagggatacttgtcacaggtaattcatgaaatatcgaagatggtgttgaaatataatgcaatcattgttatggaagatctaaattatggatttaaacgaggtaggtttagggttgaacgtcaggtataccagaaatttgagaatatgttgatatctaaactggcatacttggtagataaaagtcgaaaagccgatgaaccaggaggtgtactaagagggtatcagcttacgtatattccagattctttagagaaacttggtagccagtgtgggatcatattctatgtacctgctgcgtatacatctaagattgatccgttaacaggctttgtaaatgtattcaattttagagaatattctaattttgaaacaaaattggattttgttagatcattagacagtatacgatatgatacagagaagagattgttttcaatatcatttgattatgacaactttaaaacacataataccactctggcaaaaacgaagtgggttatatatttacgaggcgagcgtataaaaaaggaacatacatcttacgggtggaaggatgatgtttggaatgtggaaagtagaattaaagacttgtttgacagttcacatatgaaatacgatgatggacataatttaattgaagatattcttgaattagaatcgagtgtacagaagaagctgatcaatgaattgatagaaataataaggttgactgttcaacttcgtaacagtaagtcagagagatacgataggacagaagctgaatacgacagaatagtatcgccagttatggatgaaaaaggacggttttatgattcggaaaattatattttcaatgaagaaacagagttaccaaaggatgcagatgctaatggtgcatattgcattgcattaaaaggtctgtacaatgtcatagccataaagaataactggaaagaaggagagaaattcaacagaaaattgttaagtctaaataattataactggttcgattttatacaaaatagaaggttttaa

SEQ ID NO: 911-917 - skipped (7 entries)

SEQ ID NO: 918 - DNA, 3816 bp, Leptospira ryugenii
atgaagaatctcgcaaactttacaaatttatacagcttacagaaaacacttcgttttgaactaaaaccaattggaaaaactttagactggatcatcaaaaaggatcttttgaagcaggatgagattcttgcagaagattataaaatagtcaaaaagattatagatcgttatcataaagatttcatagaccttgcatttgaatccgcctatctacaaaagaagtcctccgattcctttaccgcgatcatggaagcatctatccaatcgtattctgaactttattttataaaagaaaagtctgacagagataagaaagccatggaagaaatttccggaataatgcgaaaagaaatagtagaatgttttactggaaagtatagcgaagttgttaaaaagaaatttggcaatcttttcaaaaaagagcttatcaaagaagatttactgaatttttgcgaaccagatgaattacctatcatccaaaagtttgcggacttcactacctattttactggatttcatgaaaatcgggagaatatgtattctaatgaggagaaagcaacagctattgccaatcgactcatccgcgaaaacctaccgagatatctagataacctaaggatcattcgatcaatccaaggcagatacaaagattttggttggaaagatttagaatccaatctgaagcggattgataaaaatctccaatattcggatttccttacagaaaatggctttgtgtacactttttcccaaaaaggcatagaccggtacaatttgatcctgggagggcaatcggtcgagtcgggagagaagatacaaggacttaatgaacttatcaatttgtatagacaaaagaatcaattggatagaagacaacttccaaatttaaaagaactgtataagcagatacttagtgatcgaactagacattcttttgtaccagagaagttttcatctgataaagcactgttgcgatctcttctggattttcacaaagaagtgattcaaaataaaaatttatttgaggagaagcaggtaagccttttacaggcaatcagggagacacttactgatttaaaatcctttgacctagataggatatatttaacaaacgacacaagtctcactcaaatttcaaattttgtatttggtgattggtcaaaagttaagacaatactagcaatctatttcgatgaaaacatagctaatcctaaagacagacaaaggcaatcgaattcatatctaaaagcaaaggagaattggctcaaaaaaaattattattcaatacacgaattgaatgaggcaatttcggtatatggaaaacattctgatgaggaattgcctaacacaaagatcgaagattatttctctggtcttcaaactaaagatgagactaaaaagccaatagatgtactcgatgcaattgtctctaaatatgctgacttagagagtttgcttacgaaggaatatcctgaagataaaaatttaaaatcagataaaggtagtatcgaaaaaatcaagaactacctagattcgattaaactattacaaaattttttaaaacctctaaaaccaaagaaggttcaggatgaaaaggatttaggcttctacaatgatcttgaactttatctggaatcactagaatcagctaatagcctttacaataaggtgcgaaactatctaactggaaaagaatactcagatgaaaaaatcaaattaaattttaagaactctacacttcttgatggatgggatgagaacaaagaaacatcgaatttgagtgttatcttccgagataccaacaattattatttagggatactggataaacaaaacaatagaatttttgaatcaataccagaaatccaatctggggaagaaacgatccaaaaaatggtttataaattacttccgggcgcaaataatatgcttccaaaagtattcttttcagaaaaaggattattaaaatttaatccttctgatgaaattacctcattatattctgaaggcagatttaaaaaaggagataaattcagtatcaattcactccatacactcatagatttttataagaaatctttggcagtgcatgaggattggagtgtttttaatttcaaatttgatgaaactagtcattatgaagatatctcacaattttatagacaagttgaatcacaagggtataagataacattcaaaccgatttcaaaaaaatatattgatactttggtagaagacggtaaactatatctctttcagatttacaataaggacttttctcaaaataaaaaaggtggcggaaaacctaatttacataccatttactttaaatctttatttgaaaaagaaaacttaaaagacgttattgttaagttaaacggacaggcggaagtattttttcgcaaaaaatctatacactatgatgagaatatcacacgatacggacatcattctgaactcctaaaaggaagattcagctaccctatccttaaggacaaacgattcacagaagacaaatttcagtttcactttcccatcacactcaattttaaatcaggagaaatcaaacagttcaatgcacgagtaaattcctatctgaaacataacaaagatgtgaagatcattggaattgatcgcggggaacgccacttgctgtatctatctttaatcgaccaagatgggaaaatacttcggcaagaatccttaaacttaataaaaaatgaccaaaattttaaagccataaattatcaagagaaattgcacaaaaaagagatagaaagagatcaggcaagaaaatcgtgggggtccatcgagaatataaaagagttaaaggaaggctatctgtcccaagtggtacatacaatttcaaagttgatggtagaacacaatgccattgttgttctagaagatttaaattttggatttaaacgtggtcgccagaaagtagaacggcaagtctatcagaaattcgaaaaaatgctcattgaaaagctaaattttttggttttcaaggataaagaaatggatgaaccaggaggtatcctaaaagcataccaactaacggataactttgtgagctttgaaaaaatgggaaaacaaacaggttttgttttctatgttcctgcttggaatacaagtaaaatcgatcctaaaacaggtttcgtcaattttttgcatctaaactatgaaaatgtaaaccaagcaaaagaattgatcgggaaatttgatcaaattcgatataaccaagatagagattggtttgaatttcaagttacgactgaccaattctttactaaagagaatgctccagatacgcgtacctggataatttgttcaaccccaaccaaacgtttttattcaaaacgaacagtgaatggttctgtttcaacaatagagatagatgtgaaccaaaagttaaaagaacttttcaatgattgcaattaccaagatggtgaagatttagtagataggattcttgagaaagattccaaagattttttttcgaagctcattgcctatttacgaatccttacatcgcttcgtcaaaataatggtgaacagggttttgaagaaagggattttatactctctccggtggtgggcagtgatggtaaattctttaattcactagatgctagttctcaagaaccaaaggatgcagatgcaaacggcgcctaccatatcgcattaaaaggattgatgaatctacatgttatcaatgaaaccgatgatgaatccttaggtaaaccgagttggaaaattagcaacaaagactggctaaattttgtatggcaaaggccaagcttgaaagcataa

SEQ ID NO: 919-921 - skipped (3 entries)

SEQ ID NO: 922 - DNA, 3738 bp, Ruminococcus sp.
atgcaagagcataaaaaaatatcgcatcttacacacagaaattcagttcaaaaaacaattaggatgcaactgaatcctgtaggtaaaacaatggattattttcaagcaaagcaaattcttgaaaatgatgaaaagcttaaagagaactatcagaaaatcaaggaaatagcagacaggttttacagaaatttaaatgaggatgtactttcaaaaaccaggttagataaattaaaagattatactgatatttactatcactgtaatacggatgcagaccgaaaaagacttgatgaatgtgcatcggaattaaggaaagaaatcgtcaaaaattttaagaatagagatgagtataacaaactattcaataaaaagatgattgagatagttcttcccaaacatcttaaaaatgaggacgaaaaggaagttgtaacctcatttaaaaatttcacaacatactttacaggtttcttcactaacagaaaaaatatgtattcggacggagaagaatccacggcaatcgcatatagatgcattaacgaaaatttgcctaagcatcttgacaatgtcaaggcctttgaaaaagcaatttctaaactatccaaaaacgcaattgatgatttagataccacttattccggcttatgtggtacaaatttgtatgacgtttttacagttgattattttaactttttgcttccacaatccggaattaccgaatataacaaaatcatcggcggttacacaacaaacgacggtacaaaagttaagggtattaacgaatatataaatttgtacaatcaacaagtatccaaacgggataaaattcctaatcttaaaattttgtataaacaaattttaagtgagagtgaaaaggtatcattcataccgccaaagtttgaagatgacaacgaacttttatcggctgtttcagagttttacgcaaacgacgaaacctttgacgggatgccattaaaaaaagcaattgatgaaacaaagctattattcggcaatttagataatccctctcttaatggaatttacattcaaaatgaccgatccgtgacaaatctgtcaaacagtatgttcggttcttggtcggtaatagaagatttatggaacaaaaattatgactccgttaattcaaacagcagaatcaaagatattcaaaagcgtgaagacaaaagaaaaaaagcatacaaagcagaaaagaaactttcactttcatttttacaggttttgatttccaattctgaaaatgatgaaatcagagaaaagtctatcgtagattactacaagacttctttaatgcaacttaccgacaatttgtcagacaaatacaacgaagcagcacctctgctcaatgagaattactctaatgaaaaaggtttgaaaaatgacgataaatctatttcattaattaaaaattttcttgatgccataaaagaaattgaaaaattcataaagcctttgtccgaaactaatattacaggtgagaaaaatgatttgttttacagtcagttcacaccattacttgataatatcagcagaatagacatattatatgataaggtcagaaactatgttacacaaaaaccgttttcaacagataaaatcaagcttaactttggcaattcacagctattaaacggctgggatcgaaacaaagaaaaagactgcggtgccgtttggctttgtaaagatgaaaaatattatcttgcaatcatagataaaagtaataatagtattttggaaaatattgattttcaagactgcgatgaaagcgattgttatgaaaagataatttacaagcttctccccggtccaaataaaatgcttccaaaagttttcttttcagaaaagtgcaagaaacttttgtcaccgtcagacgaaatacttaaaatttataaaagcggcactttcaaaacaggtgataagttcagccttgatgattgccataagttaattgatttctacaaagaatcattcaaaaagtacccaaattggttaatttataactttaaattcaaaaaaacaaacgaatataacgatatccgcgaattttataatgatgttgctttacagggatataatatttcaaaaatgaaaatcccgacatcatttattgacaaacttgtagatgaaggaaaaatctatcttttccaactctacaacaaagacttttcaccgcatagcaagggtactcctaatctgcatacactttattttaaaatgttgtttgatgaaaggaatcttgaagatgtggtgtacaggcttaacggtgaggcagaaatgttttatcgtcctgcaagtataaaatatgacaaaccaactcatcccaaaaacacaccgataaaaaacaaaaatacactcaatgataaaaaaacaagcacttttccttatgacttaatcaaagataaacgctacactaaatggcagttttcacttcacttccctattaccatgaattttaaagctccggataaggcaatgatcaatgatgatgtcagaaatctgctgaaatcctgcaacaacaatttcatcataggaattgacagaggcgaaagaaacttgctttatgtcagcgtaattgacagcaacggtgctataatatatcagcactcactcaatattatcggaaacaagtttaaagaaaaaacatacgaaactaactaccgggaaaaacttgcaacaagagaaaaagagcgtacggaacagcgccgtaactggaaagcaattgagagtataaaagaactcaaagagggctatatcagtcaggctgtgcatgttatatgtcagcttgttgtcaagtacgatgcaatcatcgttatggaaaagctgactgacggattcaaacgaggcagaacaaagtttgaaaaacaggtttatcagaaatttgaaaaaatgctgattgacaaacttaattactatgttgacaaaaagcttgatcccgacgaagaaggcggtttacttcatgcctatcagcttacgaacaagcttgagagctttgataagcttggcatgcaaagcggttttattttctatgttcgtcctgattttacaagcaaaattgatcccgttaccggctttgtaaatttgttgtatcctcaatatgaaaacattgacaaagccaaagatatgatttcaagatttgacgaaataagatacaatgccggcgaggacttttttgaatttgacattgattacgatgagtttccaaagactgcgtctgactatcgcaaaaagtggacaatctgtactaacggcgaaaggattgaagctttcagaaatcccgcaaacaataacgaatggagttaccgtacaataattcttgcggaaaaattcaaagaattatttgataacaattctataaattatcgtgattctgacgatttgaaagctgaaattctttcacagacaaagggcaaattttttgaggatttctttaaattattaagacttaccctacagatgcgaaacagcaaccctgaaacaggcgaggaccgtattctttctcccgtcaaggacaaaaacggtaatttttacgacagttcaaaatatgatgaaaagagcaagcttccgtgtgatgccgatgcaaacggtgcgtacaacattgcccgcaaaggtttgtggattgttgaacaattcaaaaaagccgataatgtttcaactgtcgaaccggtaatccacaatgaccaatggctgaaatttgttcaggagaatgatatggcgaataattaa

SEQ ID NO: 923-925 - skipped (3 entries)

SEQ ID NO: 926 - DNA, 3738 bp, Ruminococcus bromii
atgcaagagcataaaaaaatatcgcatcttacacacagaaattcagttcaaaaaacaattaggatgcaactgaatcctgtaggtaaaacaatggattattttcaagcaaagcaaattcttgagaatgatgaaaagcttaaagaggactatcagaaaatcaaggaaatagcagacaggttttacagaaatttgaatgaggatgtactttcaaaaaccgggttagataaattaaaagattatgctgatatttactatcactgtaatacggatgcagaccgaaaaagacttaatgaatgtgcatcggaattaaggaaagaaatcgtcaaaaattttaagaatagagatgagtataacaaactattcaataaaaagatgattgagatagttcttcccaaacatcttaaaaatgaggacgaaaaggaagttgtagcctcatttaaaaatttcacaacatactttacaggtttcttcactaacagaaaaaatatgtattcggacggagaagaatccacggcaatcgcatatagatgcattaacgaaaatttgcctaagcatcttgacaatgtcaaggtctttgaaaaagcaatttctaaactatccaaaaatgcaattgatgatttaggtgccacttattccggcttatgcggtacaaatttgtatgatgtttttacagttgattattttaactttttgcttccacaatccggaattaccgaatataacaaaatcatcggcggttacacaacaagcgacggtacaaaagttaagggtattaacgaatatataaatttgtacaatcaacaagtatccaaacgggataaaattcctaatcttaaaattttgtataaacaaattttaagtgagagtgaaaaggtatcattcataccgcctaagtttgaagatgacaacgaacttttatcggctgtttcagagttttacgcaaacgacgaaacctttgacgggatgccattaaaaaaagcaattgatgaaacaaagctattattcggcaatttagataattcctctcttaatggaatttacattcaaaatgaccgatccgtgacaaatctgtcaaacagtatgttcggttcttggtcagtaatagaagatttatggaacaaaaattatgactccgttaattcaaacagcagaatcaaagatattcaaaagcgtgaagacaaaagaaaaaaagcatacaaagcagaaaagaaactttcactttcatttttacaggttttgatttccaattccgaaaatgatgaaatcagagaaaagtctatcgtagattactacaagacttctttaatgcaacttaccgacaatttatcagacaaatacaaagaagcagcacctctgttcagtgaaaattacgataatgaaaaaggtttgaaaaatgacgataaatctatttcattaattaaaaattttcttgatgccataaaagaaattgaaaaattcatcaagcctttgtccgaaactaatattacaggtgagaaaaatgatttgttttacagtcagttcacaccattacttgataatatcagcagaatagacatattatatgataaggtcagaaactatgttacacaaaaaccgttttcaaccgataaaatcaaacttaactttggtaattcacagctattaaacggctgggataaagacaaagaaagagagtacggagccgttttgctttgtaaagatgaaaagtattatcttgcaatcatagataaaagtaataatagtattttggaaaatattgattttcaagactgcaatgaaagcgattattatgaaaagatagtttataaacttctgactaaaataaatggaaatctcccgcgtgttttcttttcagaaaagcgcaagaaacttttgtcaccatcagacgaaatacttaaaatttataaaagcggcactttcaaaaaaggtgataagttcagccttgatgattgccataagttaattgatttctacaaagaatcattcaaaaagtacccaaattggttaatttataactttaaatttaaaaacacaaacgaatataatgatatcagcgaattttataatgatgttgcttcacagggatataatatttcaaaaatgaaaatcccgacaacatttattgacaaacttgtagatgaaggaaaaatctatcttttccaactctacaacaaagacttttcaccgcatagcaagggtactcctaatctgcatacactttattttaaaatgttgtttgatgaaagaaatcttgaagatgtggtgtacaagcttaacggtgaggcagaaatgttttatcgtcctgcaagtataaaatatgacaaaccaactcatcccaaaaacacaccgataaaaaataaaaatacactcaatgataaaaaagcaagcacttttccttatgacttaattaaagataaacgctacactaaatggcagttttcacttcacttccctattaccatgaattttaaagctccggataaggcaatgatcaatgatgatgtcagaaatctactgaaatcctgcaacaacaatttcatcataggaattgacagaggcgaaagaaacttgctttatgtcagcgtaattgacagcaacggtgctataatatatcagcactcactcaatattatcggaaacaagtttaaaggaaaaacatacgaaactaactaccgggaaaaacttgcaacaagagaaaaagatcgtacggaacagcgccgtaactggaaagcaattgagagtataaaagaactcaaagagggatatatcagtcaggctgtgcatgttatatgtcagcttgttgtcaagtacgatgcaatcatcgttatggaaaagctgactgacggattcaaacgaggtagaacaaagtttgaaaaacaggtttatcagaaatttgaaaaaatgctgattgacaaacttaattactatgttgacaaaaagcttgatcccgacgaagaaggcggtttacttcatgcctaccagcttacgaacaagcttgagagctttgataagcttggtacgcaaagcggttttattttctatgttcgtcctgattttacaagcaaaattgatcccgttaccggctttgtaaatttgttgtatcctcgatatgaaaacattgacaaagccaaagatatgatttcaagatttgacgatataagatacaatgccggcgaggacttttttgaatttgacattgattacgataagtttccaaagactgcgtctgactatcgcaaaaagtggacaatctgtactaacggcgaaaggattgaagctttcagaaatcccgcaaacaataacgaatggagttatcgtacaataattcttgcagaaaaattcaaagaattatttgataacaattctataaattatcgtgattctgacgatttgaaagctgaaattctttcacagacaaagggcaaattttttgaggatttcttcaaattattaagacttaccctacagatgcgaaacagtaaccctgaaacaggcgaggaccgtatcctttcccccgtcaaggacaaaaacggcaatttttacgacagttcaaaatatgacgaaaagagcaagcttccgtgtgatgccgatgcaaacggtgcgtacaacattgcccgcaaaggtttgtggattgttgaacaattcaaaaaagccgataatgtttcaactgtcgaaccggtaatccacaatgacaaatggctgaaatttgttcaggagaatgatatggcgaataattaa

SEQ ID NO: 927-929 - skipped (3 entries)

SEQ ID NO: 930 - DNA, 3738 bp, Ruminococcus bromii
atgcaagagcgtaaaaaaatatcgcatcttacacacagaaattcagttaaaaaaacaattaggatgcaactgaatcctgtaggtaaaacaatggattattttcaagcaaagcaaattcttgaaaatgatgaaaagcttaaagagaactatcagaaaatcaaggaaatagcagacaggttttacagaaatttaaatgaggatgtactttcaaaaaccgggttagataaattaaaagattatgctgaaatttactatcactgtaatacggatgcagaccgaaaaagacttaataaatgtgcatcggaattaaggaaagaaatcgtcaaaaattttaagaatagagatgagtataacaaactattcgataaaaggatgattgagatagttcttcccaagcatcttaaaaatgaggacgaaaaggaagttgtagcctcatttaaaaatttcacaacatactttacaggtttcttcactaacagaaaaaatatgtattcggacggagaagaatccacggcaatcgcatatagatgcattaacgaaaatttacctaagcatcttgacaatgtcaaggcctttgaaaaagcaatttctaaactatccaaaaacgcaattgatgatttagatgccacttattccggcttatgcggtacaaatttgtatgatgtttttacagttgattattttaactttttgcttccacaatccggaattaccgaatataacaaaatcatcggcggttacacaacaaacgacggtacaaaagttaagggtattaacgaatatataaatttgtacaatcaacaagtatccaaacgggataaaattcctaatcttcaaattttgtataaacaaattttaagtgagagtgaaaaggtatcattcataccgccaaagtttgaagatgacaacgaacttttatcggctgtttcagagttttacgcaaacgacgaaacctttgacgggatgccattaaaaaaagcaattgatgaaacaaagctattattcggcaatttagataattcctctcttaatggaatttacattcaaaatgaccgatccgtgacaaatctgtcaaacagcatgttcggttcttggtcggtaatagaagatttatggaacaaaaattatgactccgttaattcaaacagcagaatcaaagatattcaaaagcgtgaagacaaaagaaaaaaagcatacaaagcagaaaagaaactttcactttcatttttacaggttttgatttctaattccgaaaatgatgaaatcagaaaaaagtctatcgtagattactacaagacttctttaatgcaacttaccgacaatttatcagacaaatacaacgaagcagcacctctgctcaatgagaattactctaatgaaaaaggtttgaaaaatgacgataaatctatttcattaattaaaaattttcttgatgccataaaagaaattgaaaaattcatcaagcctttgtccgaaactaatattacaggtgagaaaaatgatttgttttacagtcagttcacaccattacttgataatatcagcagaatagacatattatatgataaggtcagaaactatgttacacaaaaaccgttttcaaccgataaaatcaaacttaactttggcaattaccagctattaaacggctgggataaagacaaagaaagagagtacggagccgttttgctttgtaaagatgaaaagtattatcttgcaatcatagataaaagcaataatcgtattttggaaaatattgattttcaagactgcgatgaaagcgattgttacgaaaagataatttacaagcttctccccactccaaataaaatgcttccaaaagttttctttgcaaaaaagcacaaaaaacttttgtcaccgtcagacgaaatacttaaaatttataaaaacggcactttcaaaaaaggtgataagttcagccttgatgattgccataagttaattgatttctacaaagaatcattcaaaaagtacccaaaatggttaatttataactttaaattcaaaaaaacaaacggatataatgatatccgcgaattttataatgatgttgctttacagggatataatatttcaaaaatgaaaatccctacatcatttattgacaaacttgtagatgaaggaaaaatctatcttttccaactctacaacaaagacttttcaccgcatagcaagggtactcctaatctgcatacactttattttaaaatgttgtttgatgaaagaaatcttgaagatgtggtgtataggcttaacggtgaggcagaaatgttttatcgtcctgcaagtataaaatatgacaaaccaactcatcccaaaaacacaccgataaaaaataaaaatacactcaatgataaaagagcaagcacttttccttatgacttaattaaagataaacgctacactaaatggcagttttcacttcacttccctattaccatgaattttaaagatccggataaggcaatgatcaatgatgatgtcagaaatctgctgaaatcctgcaacaacaatttcatcataggaattgacagaggcgaaagaaacttgctttatgtcagcgtaattaacagcaacggtgctataatatatcagcactcactcaatattatcggaaacaagtttaaaggaaaaacatacgaaactaactaccgggaaaaacttgcaacaagagaaaaagatcgtacggaacagcgccgtaactggaaagcaattgagagtataaaagaactcaaagagggctatatcagtcaggctgtgcatgttatatgtcagcttgttgtcaagtacgatgcaatcatcgttatggaaaagctgactgacggattcaaacgaggcagaacaaagtttgaaaaacaggtttatcagaaatttgaaaaaatgctgattgacaaacttaattactatgttgacaaaaagcttgatcccgacgaagaaggcggtttacttcatgcctatcagcttacgaacaagcttgagagctttgataagcttggtacgcaaagcggttttattttctatgtccgtcctgattttacaagcaaaattgatcccgttaccggctttgtaaatttgttgtatcctcgatacgaaaaaattgacaaagccaaagatatgatttcaagatttgacgatataagatacaatgccggcgaggacttttttgaatttgacattgattacgataagtttccaaagactgcgtctgactatcgcaagaagtggacaatctgtactaacggcgaaaggattgaagctttcagaaatcccgcaaacaataacgaatggagttatcgtacaataattcttgcagaaaaattcaaagaattatttgataacaattctataaattatcgtgattctgacgatttgaaagctgaaattctttcacagacaaagggcaaattttttgaggatttctttaaattattaagacttaccctacagatgcgaaacagtaaccctgaaacaggcgaggaccgtattctttctcccgtcaaggacaaaaacggcaatttttacgacagttcaaaatatgatgaaaagagcaagcttccgtgtgatgccgatgcaaacggtgcgtacaacattgcccgcaaaggtttgtggattgttgaacaattcaaaaaagccgataatgtttcaactgtcgaaccggtaatccacaatgacaaatggctgaaatttgttcaggagaatgatatggcgaataattaa

SEQ ID NO: 931-933 - skipped (3 entries)

SEQ ID NO: 934 - DNA, 3738 bp, Ruminococcus sp.
atgcaagagcgtaaaaaaatatcgcatcttacacacagaaattcagttctaaaaacaattgggatgcaactgaatcctgtaggtaaaacaatggattattttcaagcaaagcaaattcttgaaaatgatgaaaagcttaaagaggactatcagaaaatcaaggaaatagcagacaggttttacagaaatttaaatgaggatgtactttcaaaaaccgggttagataaattaaaagattatgctgaaatttactatcactgtaatacggatgcagaccgaaaaagacttaataaatgtgcatcggaattaaggaaagaaatcgtcaaaaattttaagaatagagatgagtataacaaactattcgataaaaggatgattgagatagttcttcccaagcatcttaaaaatgaggacgaaaaggaagttgtagcctcatttaaaaatttcacaacatactttacaggtttcttcactaacagaaaaaatatgtattcggacggagaagaatccacggcaattgcatatagatgcattaacgaaaatttgcctaagcatcttgacaatgtcaaggcctttgaaaaagcaatttctaaactatccaaaaacgcaattgatgatttagatgccacttattccggcttatgcggtacaaatttgtatgatgtttttacagttgattattttaactttttgcttccacaatccggaattaccgaatataacaaaatcatcggcggttacacaacaagcgacggtacaaaagttaagggtattaacgaatatataaatttgtacaatcaacaagtatccaaacgggataaaattcctaatcttcaaattttgtataaacaaattttaagtgagagtgaaaaggtatcattcataccgccaaagtttgaagatgacaacgaacttttatcggctgtttcagagttttacgcaaatgacgaaacctttgacgagatgccattaaaaaaagcaattgatgaaacaaagctattattcggcaatttagataattcctctcttaatggaatttacattcaaaatgaccgatccgtgacaaatctgtcaaacagtatgttcggttcttggtcagtaatagaagatttatggaacaaaaattatgactccgttaattcaaacagcagaatcaaagatattcaaaagcgtgaagacaaaagaaaaaaagcatacaaagcagaaaagaaactttcactttcatttttacaggttttgatttccaattccgaaaataatgaaatcagagaaaagtctatcgtagattactacaagacttctttaatgcaacttaccgacaatttgtcagacaaatacaacgaagtagcacctctgctcaatgagaattactctaatgaaaaaggtttgaaaaatgacgataaatctatttcattaattaaaaattttcttgatgccataaaagaaattgaaaaattcatcaagcctttgtccgaaactaatattacaggtgagaaaaatgatttgttttacagtcagttcacaccattacttgataatatcagcagaatagacatattatatgataaggtcagaaactatgttacacaaaaaccgttttcaaccgataaaatcaagcttaactttggcaattaccagctattaaacggctgggataaagacaaagaaagagagtacggagccgttttgctttgtagggatgaaaagtattatcttgcaatcatagataaaagcaataatcgtattttggaaaatattgattttcaagactgcgatgaaagcgattgttacgaaaagataatttacaagcttctccccactccaaataaaatgcttccaaaagttttctttgcaaaaaaacacaaaaaacttttgtcaccgtcagacgaaatacttaaaattcgtaaaaacggcactttcaaaaaaggcgataagttcagccttgatgattgccataagttaattgatttctacaaagaatcattcaaaaagtacccaaattggttaatttataactttaaattcaaaaaaacaaacgaatataacgatatccgcgaattttataatgatgttgctttacagggatataatatttcaaaaatgaaaatcccgacatcatttattgacaaacttgtagatgaaggaaaaatctatcttttccaactctacaacaaagacttttcaccgcatagcaagggtactcctaatctgcatacactttattttaaaatgttgtttgatgaaagaaatcttgaagatgtggtgtacaagcttaacggtgaggcaaaaatgttttatcgtcctgcaagtataaaatatgacaaaccaactcatcccaaaaacacaccgataaaaaataaaaatacactcaatgataaaaaagcaagcacttttccttatgacttaattaaagataaacgctacactaagtggcagttttcacttcacttctctattaccatgaattttaaagctccggataaggcaatgatcaatgatgatgtcagaaatctgctgaaatcctgcaacaacaatttcatcataggaattgacagaggcgaaagaaacttgctttatgtcagcgtaattgacagcaacggtgctataatatatcagcactcactcaatattatcggaaacaagtttaaaggaaaaacatacgaaactaactaccgggaaaaacttgcaacaagagaaaaagagcgtacggaacagcgccgtaactggaaagcaattgagagtataaaagaactcaaagagggctatatcagtcaggctgtgcatgttatatgccagcttgttgtcaagtacgatgcaatcatcgttatggaaaagctgactgacggattcaaacgaggcagaacaaagtttgaaaaacaggtttatcagaaatttgaaaaaatgctgattgacaaactgaattactatgttgacaaaaagcttgatcccgatgaagaaggcggtttacttcatgcctaccagcttacgaacaagcttgagagctttgataagcttggtacgcaaagcggttttattttctatgtccgtcctgattttacaagcaaaattgatcccgttaccggctttgtaaatttgttgtatcctcgatatgaaaacattgacaaagccaaagatatgatttcaagatttgacgatataagatacaatgccggcgaggacttttttgaatttgacattgattacgataagtttccaaagactgcgtctgactatcgcaagaagtggacaatctgtactaacggcgaaaggattgaagctttcagaaatcccgcaaacaataacgaatggagttatcgtacaataattcttgcagaaaaattcaaagaattatttgataacaattctataaattatcgtgattctgacgatttgaaagctgaaattctttcacagacaaagggcaaattttttgaggatttctttaaattattaagacttaccctacagatgcgaaacagcaaccctgaaacaggcgaggaccgtattctttctcccgtcaaggacaaaaacggcaatttttacgacagttcaaaatatgatgaaaagagcaagcttccgtgtgatgccgatgcaaacggtgcgtacaacattgcccgcaaaggtttgtggattgttgaacaattcaaaaaatccgataatgtttcaactgtcgaaccggtaatccacaatgacaaatggctgaaatttgttcaggagaatgatatggcgaataattaa

SEQ ID NO: 935-937 - skipped (3 entries)

SEQ ID NO: 938 - DNA, 3837 bp, Ruminococcus bovis
atgtcaatcaacattaacaaattttcagatgaatgtagaaaaattgattttttcactgatttatacaacattcaaaaaactttaagattcagccttattccaataggagcaactgctgacaactttgaatttaaaggcagattatccaaagaaaaagatttgctagattctgcaaagcgtatcaaggagtatatttcaaagtaccttgcagatgaaagtgatatatgtctttcccaacccgtaaagttaaagcatcttgatgagtactatgaactttatatcactaaagacagggatgaacagaagtttaagtctgttgaagaaaagttaaggaaagaattagccgatcttttaaaagaaattttgaaacgattaaataaaaagattttatctgattatctacctgagtatcttgaagatgacgaaaaggcccttgaagatatagcaaatctttcttctttctcaacttattttaacagttattacgataattgtaagaatatgtatacagataaggaacagtcaactgcaattccttatagatgtattaatgataatttacccaaatttattgataatatgaaagcatatgaaaaggctttagaagaactaaagccaagtgaccttgaagaacttagaaataactttaagggtgtatatgacacaacagttgatgatatgtttaccttggattatttcaattgtgttctttcacagtcaggtattgattcctacaacgctattataggtaatgacaaggttaaggggattaatgagtacattaatctccataaccaaactgcagaacaaggtcataaagtccctaacctaaaacgactatataagcagattggcagtcaaaaaaagactatttcttttcttcctagtaagtttgaaagtgacaatgaactcctaaaagcagtttatgatttctataataccggtgatgctgaaaagaacttcactgcattaaaagacactataactgaatttgagaagatttttgataatctatcagaatataaccttgatggtgtgtttgtaaggaatgatatttcacttactaatttatcacaaagtatgttcaatgattggtcagtattccgtaatttatggaatgaccaatatgataaagtcaataatccggagaaagcaaaagatattgataagtataatgacaagagacataaagtctataaaaagtcagaaagtttttcaattaatcagctacaagagttaattgcaacaactcttgaagaagatattaacagtaagaaaattacagattactttagttgtgattttcatagagttacaacagaagttgaaaataaatatcaactagtaaaagacttattatctagtgattatccgaaaaataaaaacctaaaaacaagcgaagaagatgtagcacttattaaggactttttagatagtgttaaatcattagaaagttttgtgaaaatactaaccggtaccggcaaagaaagtggcaaggatgaacttttctatggtagttttacaaaatggtttgatcagttgagatatattgataagctatatgacaaggtaagaaattacattacggaaaagccttattcacttgataaaattaagctgtcttttgataatccacagttcctaggtggatggcaacatagcaaagaaactgactattcagcacaactttttatgaaagatggattgtattatcttggtgtaatggacaaagaaaccaagagagaattcaaaactcagtataatactcctgaaaatgatagtgatacaatggttaagattgagtacaatcaaatcccaaatccgggtagagttattcaaaatcttatgcttgttgatggcaagattgtaaagaaaaacggtagaaagaatgctgatggtgttaatgctgttcttgaagaactaaagaatcagtatctacctgaaaatatcaatagaattagaaaaaccgaaagttataaaaccacaagtaataactttaacaaagatgacctaaaagcatatttagagtactatattgcaagaactaaggaatattattgcaagtacaattttgtttttaagtcagctgatgagtatggaagttttaatgaatttgttgatgatgttaacaatcaagcctaccaaattaccaaagtgaaagtatctgaaaaacaattactttcattagtagaacaaggcaaactttatcttttcaaaatctacaacaaggatttttctgagtatagtaagggtaagaaaaacttacatactatgtattttcaaatgctatttgatgacagaaatcttgaaaatttagtgtacaagctacaaggtggagcagaaatgttctatagacctgcaagtatcaagaaagattcagaatttaaacatgatgcaaatgttgaaattattaagcgtacttgtgaagataaagtaaatgataaagacaatcctacagatgatgagaaagctaagtattatagcaaatttgactacgatatagtaaagaacaaacgctttactaaagatcaattttctctacatttaactttagcaatgaattgtaatcagcctgaccattattggttaaacaatgatgttagagaacttctcaagaagtcaaataaaaaccatattattggtattgatagaggtgaaagaaatcttatctatgtaactataattaatagtgatggagtaatagttgaccaaatcaacttcaatattattgaaaacagttacaatggtaaaaaatacaaaactgattatcagaaaaaacttaatcaaagggaagaagatagacaaaaggcaagaaaaacttggaaaactattgaaacaattaaggaactgaaagacggttacattagtcaggttgtacatcaaatttgtaaacttattgttcaatatgatgcaattgttgtgatggaaaaccttaatggtggtttcaaaagaggtagaacaaaagttgaaaaacaagtttatcaaaagtttgaaactatgcttattaataagctgaattattatgttgataaaggtactgactataaagaatgtggtggacttttaaaggcatatcagcttacaaataagtttgaaacatttgaaagaatcggtaaacaaagtggtattatcttttatgttgacccatatctgacaagtaagattgacccggtaacaggttttgcaaatctgctttatcctaagtatgaaacaataccaaaaactcacaacttcattagcaatattgatgatattcgatataaccaaagtgaagattactttgagtttgatattgattatgataagttcccgcaaggtagttacaattatcgtaagaagtggacaatctgttcttatggcaacagaattaagtattacaaagattcaagaaataaaacagctagtgtagttgttgatattactgaaaagttcaaggaaacttttactaacgcaggtattgactttgttaatgataatattaaggaaaagttattgttagttaatagtaaggaactcctaaagtcatttatggatactcttaaactgactgttcagttgagaaattctgaaattaatagtgatgttgattacattatctcaccgataaaggatagaaacggtaacttctattatagcgaaaactacaaaaagtctaataatgaagtaccgtcacaaccacaagacggtgatgcaaatggtgcatataacattgcacgaaaaggattgatgattattaacaaactaaaaaaagccgatgatgtaaccaataatgagttgttgaaaatcagcaaaaaggaatggctggaatttgctcaaaaaggtgatttaggtgagtga

SEQ ID NO: 939-941 - skipped (3 entries)

SEQ ID NO: 942 - DNA, 4689 bp, Leptospira ilyithenensis
atgaaagcaacatccatttgggacaactttactcgtaaatattccgtatctaaaacacttcggtttgaattgaggccagtggggaagacggaagagaatattgtgaaaaaggaaattattgatgcagagtggatcagcggaaagaatattccgaagggaactgatgctgaccgggcaagagattataaaattgttaaaaaattactgaatcaactccatattttatttattaatcaggcattatcctctgaaaatgtgaaagagttcgaaaaagaggataaaaagagtaaaacattcgttgcatggagtgatttacttgcaactcattttgacaactggattcaatatactcgtgataaaagtaattccactgtcttaaaatccttagagaaatcgaaaaaggacctatattcaaaacttgggaaactactcaactctaaagccaatgcctggaaggcagagtttataagttatcacaaaattaaaagcccggacaatataaagattagattgtctgcaagcaatgttcagatactatttggaaatacatcggatcccattcaattattgaaatatcagattgagttagataatataaaatttctaaaggatgatggatccgaatatactacaaaagaattagccgacttgctttctacgtttgaaaaatttggaacttatttttctggattcaatcaaaatcgagcaaatgtctatgacattgatggcgagatttctacctcaattgcatatagactttttaatcaaaatatagaattctttttccaaaacattaaaagatgggagcaattcactagttctattggtcataaagaagcaaaggaaaatctaaaattagtccaatgggatattcaatcaaaactcaaagaattagatatggaaatagttcaaccaagatttaatcttaaatttgaaaaattactcactccacaatcgttcatttatctactcaaccaagaaggcattgatgcattcaacactgtccttggtggaattcccgcagaagtgaaagctgagaaaaagcagggagtaaacgaactaatcaatttaactcgacagaaattaaatgaagacaagagaaaattcccttctcttcagattatgtataaacagatcatgagtgaaagaaaaacaaacttcattgatcagtatgaagatgatgtagaaatgttaaaggaaatccaagaatttagtaatgactggaatgaaaaaaagaaaaggcattcagcatcaagtaaagagatcaaagaaagtgcaattgcctatattcaaagagagtttcatgaaacattcgattcattggaagaacgcgctaccgtaaaagaagatttctatctgagtgaaaagtcaattcagaatctatcaattgatatttttggaggttataataccatccacaatctttggtatacagaagtagagggaatgttaaaatccggcgaacgaccactcactagagtagaaaaagaaaaactcaaaaaacaagagtatatttctttcgctcaaatcgaaaggcttatctcaaagcattcacaacaatatctagattcaacgccaaaagaggccaatgatagatctcttttcaaagagaagtggaaaaaaacgtttaaaaatggatttaaggtatcagaatatacaaatttaaaattgaatgagctaatatctgaaggtgaaacatttcaaaagattgatcaagaaactgggaaagaaaccacaattaaaattcctggtttatttgaaagttacgaaaatgcaatattagtcgaatccataaaaaatcaatcgcttggaacaaataaaaaagagtctgttccgtccattaaagaatatcttgattcctgtttgagattatctaaattcattgaatcatttttagtcaattcaaaggatctaaaagaagatcaatccttagatggttgcagcgactttcagaatacgcttacacaatggctcaatgaggaatttgatgttttcattttgtacaacaaggtaagaaaccatgtaaccaaaaaaccaggaaatactgataagataaaaataaacttcgacaacgctacgttattagatggttgggatgtagataaggaagcagcaaacttcggatttctacttaagaaggcggataactactatctaggaatagctgattccagctttaatcaagacttaaagtattttaacgaaggagagagattggatgaaattgaaaaaaacagaaagaatcttgaaaaagaagagagtaaaaacatttcgaaaatcgaccaggaaaaagtaaaaaaatataaggaagtaattgatgacttaaaagcaatttccaatcttaataaaggacgttattcgaaagcattttataaacaaagcaaatttactactttaataccaaaatgcaccacacagctaaatgaagtgatagagcattttaagaaattcgacactgattatagaattgaaaataaaaaatttgcaaaaccttttataatcacaaaagaagtctttttacttaataatacagtttatgatacagccaccaaaaagtttactcttaaaataggtgaggatgaagatacaaaaggattaaaaaaatttcaaatcggatattatcgtgcgacagatgacaaaaaaggatatgagtccgccttacgaaactggataactttttgtattgagtttacgaaaagttataaaagttgccttaactataattactcatccttaaaatctgtgtccgaatacaagtcactagatgaattctataaagatttaaatggaatagggtatacgattgatttcgtagacatttccgaagaatacataaataaaaaaataaatgaaggaaaactatatcttttccaaatctacaataaagatttttcagaaaaatcaaaaggaaaagaaaacctccatacgacctattggaagttgttatttgattcgaaaaaccttgaagatgtagttataaaactaaacggacaagcggaagtgttctttcgaccagcttctattcatgaaaaagaaaaaatcactcatttcaaaaatcaggaaatacaaaataagaatcctaatgctgtgaaaaaaactagtaaatttgaatatgatataatcaaagacaatcgatttacgaaaaacaaattcttgtttcattgccctatcacattgaattttaaggcagatggaaatccgtatgtaaataacgaagttcaagaaaatatagcaaaaaatccaaatgtgaacatcattggaatcgaccgtggagaaaaacatctcctttattttacagttatcaatcagcaagggcaaatactcgatgctggtagtctgaattccattaaatccgaatataaagataaaaaccaacaatcagtctcctttgagacaccgtaccacaaaatcttagataaaaaagagtcagaaagaaaagaggcaagggaatcttggcaagaaattgaaaatatcaaagaactaaaagcaggatatttgtcacacgtagtacaccaattatcaaatttgatcgttaaatacaatgcgatagtggtactcgaagatttaaataagggatttaaaagaggtagatttaaagttgaaaaacaagtttatcaaaaatttgaaaagtcgttgatagaaaagttgaattatctggttttcaaagaccgcaaagaatcaaatgaacctgggcatcatttgaatgcttatcaattaacaaataaattcttaagctttgaaagattaggtaaacagtcaggagtccttttttatgcaactgcgagttatacatcaaaagtggatcctgtcactggctttatgcaaaatatttatgatccatatcataaagaaaaaacaagggaattctataagaattttaccaagattgtttataatggaaactactttgaatttaattatgatttgaactcagtaaagcctgattctgaagaaaaaagatatcggacaaattggacagtatgcagttgtgtgattcgatctgagtatgattcaaattccaaaactcaaaaaacttataatgtaaatgatcaacttgtaaaactattcgaggatgccaaaataaaaattgagaacggaaacgatctaaaatccaccattctagaacaagatgataaatttatccgagacctccatttttactttattgcaatacagaagatgagagttgttgattcaaaaatagaaaaaggagaagattcgaatgattatattcaatcgcccgtttatcctttctattgttccaaagaaattcaaccgaacaaaaaaggattctatgaacttccaagcaatggagattccaatggagcctacaatatcgcgcggaaaggaattgtaattttggataagattcgtttgagagttcaaatcgaaaaattgtttgaagatggaacgaaaattgattggcaaaaacttccaaaccttatttcaaaagtaaaagataaaaaacttctcatgactgtctttgaagaatgggcagaactgacacatcaaggggaagttcagcaaggtgacttgcttgggaaaaagatgagtaagaaaggagaacaatttgctgaatttataaaaggactcaatgttacaaaggaagattgggaaatttatactcaaaatgaaaaagtagtacaaaagcagataaagacttggaaattgtttagcaattctacctaa

SEQ ID NO: 943-945 - skipped (3 entries)

SEQ ID NO: 946 - DNA, 2616 bp, Prevotella sp.
attaaggctattaatgaatattataagcagttgggagcttattgtcgtgaagaaggaaaagaaaaagatgatttctttaagcgtattgatggtgcttattgtgctatatcacatcttttctttggggaacatggcgaaatagcccagtcagactcagatgttgagcttatccaaaagttgctcgaagcctataaggggttacaacgctttatcaagcctttattaggtcatggtgatgaagctgataaagacaatgagtttgatgcaaaacttcgtaaagtatgggatgaactcgacatcattacaccgctttatgataaagtacgcaattggctctctcgtaagatatataaccctgagaaaataaagctatgttttgagaataatggcaagttgttatctggatgggttgacagcagaactaaatccgataatggtactcaatatggagggtatatctttagaaagaagaatgaaattggtgaatacgatttctatttgggtatttctgctgatacaaaactgtttcgtcgtgatgctgccatcagttatgatgatggcatgtacgagagattagattattatcagctgaaatcaaaaactttactcggaaatagttatgttggagattatggactggattcgatgaatttgctttctgcatttaaaaatgctgcagttaagttccaatttgaaaaggaagtggttcctaaagataaagagaatgtgccaaaatatctcaagcgcctaaaactggattatgcaggattttatcaaattttgatgaatgatgataaggttgttgatgcttacaagattatgaagcagcatattcttgcgacattgacttcttcgattcgtgtacctgcggcaatagagttagctactcaaaaagaattgggtattgacgaattgattgatgaaataatgaatttaccgtccaagtcattcggctatttccctattgtcactgcagcaatagaagaagctaacaagagagagaataaacctttgtttctttttaagatgagtaacaaggatctttcttatgcagcaacagcttctaaagggttaagaaaaggtcgaggaacagagaatcttcattcaatgtatctcaaagctcttctggggatgacacagagtgtttttgatatcggaagtggaatggtattctttcgtcaccaaactaaaggtttggcagaaacaacggcaagacataaagctaatgagtttgttgctaataagaacaagcttaatgacaagaaaaagagtatttttggctatgagatagtgaagaataaacgttttacggtagataagtacctttttaagttgtctatgaatttgaattattcgcaaccaaataacaataaaattgatgtaaattctaaagttcgtgaaataattagtaatggaggtataaagaatattattggcatagatcgtggtgaacgtaatttactttatctgtctttaatagatctgaagggaaatattgtcatgcagaagtctctcaatattctcaaggatgatcataatgcaaaggaaactgattataaaggtttgctgacagaacgagaaggagaaaataaagaagctcgccgcaattggaagaagatagcgaatatcaaagatttaaaacgaggttatttaagtcaggtagtacatatcattagtaaaatgatggtagaatacaatgcaattgttgtacttgaagatttaaatccaggttttatcagaggcagacaaaaaatcgagcgtaacgtatatgaacaattcgaaagaatgctaattgacaagttgaatttttatgttgacaagcataaaggtgccaatgaaacgggaggtttgttgcatgcacttcagcttacttctgaatttaaaaatttcaagaaaagtgagcatcagaatgggtgtcttttctatattcctgcatggaatactagcaaaatagatcctgcaacaggttttgtcaatctctttaatacgaaatatacgaatgcagttgaggcgcaggagttctttagtaaatttgacgagattcgttacaacgaggagaaagattggtttgagtttgaatttgattacgataaattcactcagaaggcgcatggtacacgtactaagtggacgctctgtacttatggtatgcgtttgcgttcatttaaaaattctgcaaaacaatataattgggattcagaggtagtagcgcttaccgaagaattcaaaagaatacttggagaagcaggtattgatattcatgagaatctaaaagatgcaatctgtaatttggaaggtaaaagccagaagtatctcgaacctttgatgcagtttatgaaattgctgctacaattgcgtaatagtaaggctggtactgacgaagattatatcctttctccagttgctgatgagaatggaatattctacgatagccgttcttgtggtgatcaacttccggagaatgcggatgctaatggtgcttacaacatcgctcgcaagggactgatgctgattgagcaaatcaagaatgcagaggatttgaataacgtcaagtttgatatatccaataaggcttggctcaattttgcacaacaaaagccatataagaatggatga

SEQ ID NO: 947-949 - skipped (3 entries)

SEQ ID NO: 950 - protein, 1244 aa, Phocaeicola plebeius
METFSGFTNLYPLSKTLRFRLIPVGETLKHFIDSGILEEDQHRAESYVKVKAIIDDYHRAYIENSLSGFELPLESTKFNSLEEYYLYHNIRNKTEEIQNLSSKVRTNLRKQVVAQLTKNEIFKRIDKKELIQSDLIDFVKNEPDANEKIALISEFRNFTVYFKGFHENRRNMYSDEEKSTSIAFRLIHENLPKFIDNMEVFAKIQNTSISENFDAIQKELCPELVTLCEMFKLGYFNKTLSQKQIDAYNTVIGGKTTSEGKKIKGLNEYINLYNQQHKQEKLPKMKLLFKQILSDRESASWLPEKFENDSQVVGAIVNFWNTIHDTVLAEGGLKTIIASLGSYGLEGIFLKNDLQLTDISQKATGSWGKISSEIKQKIEVMNPQKKKESYETYQERIDKIFKSYKSFSLAFINECLRGEYKIEDYFLKLGAVNSSSLQKENHFSHILNTYTDVKEVIGLYSESTDTKLIQDNDSIQKIKQFLDAVKDLQAYVKPLLGNGDETGKDERFYGDLIEYWSLLDLITPLYNMVRNYVTQKPYSVDKIKINFQNPTLLNGWDLNKETDNTSVILRRDGKYYLAIMNNKSRKVFLKYPSGTDRNCYEKMEYKLLPGANKMLPKVFFSKSRINEFMPNERLLSNYEKGTHKKSGTCFSLDDCHTLIDFFKKSLDKHEDWKNFGFKFSDTSTYEDMSGFYKEVENQGYKLSFKPIDATYVDQLVDEGKIFLFQIYNKDFSEHSKGTPNMHTLYWKMLFDETNLGDVVYKLNGEAEVFFRKASINVSHPTHPANIPIKKKNLKHKDEERILKYDLIKDKRYTVDQFQFHVPITMNFKADGNGNINQKAIDYLRSASDTHIIGIDRGERNLLYLVVIDGNGKICEQFSLNEIEVEYNGEKYSTNYHDLLNVKENERKQARQSWQSIANIKDLKEGYLSQVIHKISELMVKYNAIVVLEDLNAGFMRGRQKVEKQVYQKFEKKLIEKLNYLVFKKQSSDLPGGLMHAYQLANKFESFNTLGKQSGFLFYIPAWNTSKMDPVTGFVNLFDVKYESVDKAKSFFSKFDSIRYNVERDMFEWKFNYGEFTKKAEGTKTDWTVCSYGNRIITFRNPDKNSQWDNKEINLTENIKLLFERFGIDLSSNLKDEIMQRTEKEFFIELISLFKLVLQMRNSWTGTDIDYLVSPVCNENGEFFDSRNVDETLPQNADANGAYNIARKGMILLDKIKKSNGEKKLALSITNREWLSFAQGCCKNG

SEQ ID NO: 951 - protein, 1197 aa, Sulfurimonas crateris
MLSNFTNQYQLSKTLRFELKPVGDTLKHIEKSGLIAQDEIRSQEYQEVKTIIDKYHKAFIDEALQNVVLSNLEEYEALFFERNRDEKAFEKLQAVLRKEIVAHFKQHPQYKTLFKKELIKADLKNWQELSDAEKELVSHFDNFTTYFTGFHENRANMYTDEAKHSSIAYRIIHENLPIFLTNKKLFETIKQKAPHLAQETQDALLEYLSGAIVEDMFELSYFNHLLSQTHIDLYNQMIGGVKQDSLKIQGLNEKINLYRQANGLSKRELPNLKPLHKQILSDRETLSWLPESFESDEELMQGVQAYFESEVLAFECCDGKVNLLEKLPELLHQTQDYDFSKVYFKNDLALTAASQAIFKDYRIIKEALWEVNKPKKSKDLVADEEKFFNKKNSYFSIEQIDGALNSAQLSANMMHYFQSESTKVIEQIQLTYNDWKRNSSNKELLKAFLDALLSYQRLLKPLNAPNDLEKDVAFYAYFDAYFTSLCGVVKLYDKVRNFMTKKPYSLEKFKLNFENSTLLDGWDVNKESDNTAILFRKEGLYYLGIMNKKYNKVFRNISSSQDEGYQKIDYKLLPGANKMLPKVFFSDKNKEYFKPNAKLLERYKAGEHKKGDNFDLDFCHELIDFFKTSIEKHQDWKHFAYQFSPTESYEDLSGFYREVEQQGYKISYKNIAASFIDTLVAEGKLYFFQIYNKDFSPYSKGTPNMHTLYWRALFDEKNLADVIYKLNGQAEIFFRKKSIEYSQEKLQKGHHHEMLKDKFAYPIIKDRRFAFDKFQFHVPITLNFKAEGNENITPKTFEYIRSNPDNIKVIGIDRGERHLLYLSLIDAEGKIVEQFTLNQIINSYNGKDHVIDYHAKLDAKEKDRDKARKEWGTVENIKELKEGYLSHVIHKIATLIIEHGAVVAMEDLNFGFKRGRFKVEKQVYQKFEKALIDKLNYLVDKKKEPHKLGGLLNALQLTSKFQSFEKMGKQNGFLFYVPAWNTSKIDPVTGFVNLFDTRYASVEKSKAFFTKFQSICYNEAKDYFELVFDYNDFTEKAKETRSEWTLCTYGERIVSFRNAEKNHQWDSKTIHLTTEFKNLFGELHGNDVKEYILEQNSVEFFKSLIYLLKITLQMRNSITGTDIDYLVSPVADEAGNFYDSRKADTSLPKDADANGAYNIARKGLMLMHRIQNAEDLKKVNLAISNRDWLRNAQGLDK

SEQ ID NO: 952 - protein, 1252 aa, Prevotella ruminicola
MIDLKQFIGIYPVSKTLRFELRPVGKTQEWIEKNRVLEGDEQKAADYPVVKKLIDDYHKVCIHDSLNHVHFDWEPLKDAIEIFQKTKSDEAKKRLEAEQAMMRKKIAAAIKDFKHFKELTAATPSDLITSVLPEFSDDGSLKSFRGFATYFSGFQENRNNIYSQEAISTGVPYRLVHDNFPKFLSDLEVFERIKSTCPEVINQASAELQPFLEGVMIDDIFSLDFYNSLLTQNGIDFFNQVIGGVSEKDKQKYRGINEFSNLYRQQHKEIAASKKAMTMIPLFKQILSDRDTLSYIPAQIRTEDELVSSITQFYDHITHFEHDGKTINVLSEIVALLGKLDTYDPNGICITARKLTDISQKVYGKWSVIEEKMKEKAIQQYGDISVAKNKKKVDAFLSRKAYSLSDLCFDEEISFSRYYSELPQTLNAISGYWLQFNEWCKSDEKQKFLNNQTGTEVVKSLLDAMMELFHKCSVLVMPEEYEVDKSFYNEFLPLYEELDTLFLLYNKVRNYLTQKPSDVKKFKLNFESPSLASGWDQNKEMKNNAILLFKDGKSYLGVLNAKNKAKIKDAKGDVSSSSYKKMIYKLLSDPSKDLPHKIFAKGNLDFYKPSEYILEGRELGKYKKGPNFDKKFLHDFIDFYKAAISIDPDWSKFNFQYSPTESYDDIGMFFSEIKKQAYKIRFTDISEAQVNEWVDNGQLYLFQLYNKDYAEGAHGRKNLHTLYWENLFTDENLSNLVLKLNGQAELFCRPQSIKKPVSHKIGSKMLNRRDKSGMPIPESIYRSLYQYYNGKKKESELTVAEKQYIDQVIVKDVTHEIIKDRRYTRQEYFFHVPLTFNANADGNEYINEHVLNYLKDNPDVNIIGIDRGERHLIYLTLINQRGEILKQKTFNVVNSYNYQAKLEQREKERDEARKSWDSVGKIKDLKEGFLSAVIHEITNMMIENNAIVVLEDLNFGFKRGRFKVERQVYQKFEKMLIDKLNYLSFKDREAGEEGGILRGYQMAQKFISFQRLGKQSGFLFYIPAAYTSKIDPVSGFVNHFNFSDITNAEKRKDFLMKMDRIEMKNGNIEFTFDYRKFKTFQTDYQNVWTVSTFGKRIVMRIDEKGYKKMVDYEPTNDIIKAFKNKGILLSEGSDLKALIAEIEANATNAGFYSTLLYAFQKTLQMRNSNAVTEEDYILSPVAKDGHQFCSTDEANKGKDAQGNWVSKLPVDADANGAYHIALKGLYLLRNPETKKIENEKWLQFMVEKPYLE

SEQ ID NO: 953 - protein, 1287 aa, Clostridium sp.
MSYNREKMEEKELGKNQNFQEFIGVSPLQKTLRNELIPTETTKKNIAQLDLLTEDEVRAQNREKLKEMMDDYYRDVIDSTLRGELLIDWSYLFSCMRNHLSENSKESKRELERTQDSVRSQIHDKFAERADFKDMFGASIITKLLPTYIKQNSKYSERYDESVKIMKLYGKFTTSLTDYFETRKNIFSKEKISSAVGYRIVEENAEIFLQNQNAYDRICKIAGLDLHGLDNEITAYVDGKTLKEVCSDEGFAKVITQGGIDRYNEAIGAVNQYMNLLCQKNKALKPGQFKMKRLHKQILCKGTTSFDIPKKFENDKQVYDAVNSFTEIVTKNNDLKRLLNITQNANDYDMNKIYVVADAYSMISQFISKKWNLIEECLLDYYSDNLPGKGNAKENKVKKAVKEETYRSVSQLNEVIEKYYVEKTGQSVWKVESYISSLAEMIKLELCHEIDNDEKHNLIEDDEKISEIKELLDMYMDVFHIIKVFRVNEVLNFDETFYSEMDEIYQDMQEIVPLYNHVRNYVTQKPYKQEKYRLYFHTPTLANGWSKSKEYDNNAIILVREDKYYLGILNAKKKPSKEIMAGKEDCSEHAYAKMNYYLLPGANKMLPKVFLSKKGIQDYHPSSYIVEGYNEKKHIKGSKNFDIRFCRDLIDYFKECIKKHPDWNKFNFEFSATETYEDISVFYREVEKQGYRVEWTYINSEDIQKLEEDGQLFLFQIYNKDFAVGSTGKPNLHTLYLKNLFSEENLRDIVLKLNGEAEIFFRKSSVQKPVIHKCGSILVNRTYEITESGTTRVQSIPESEYMELYRYFNSEKQIELSDEAKKYLDKVQCNKAKTDIVKDYRYTMDKFFIHLPITINFKVDKGNNVNAIAQQYIAEQEDLHVIGIDRGERNLIYVSVIDMYGRILEQKSFNLVEQVSSQGTKRYYDYKEKLQNREEERDKARKSWKTIGKIKELKEGYLSSVIHEIAQMVVKYNAIIAMEDLNYGFKRGRFKVERQVYQKFETMLISKLNYLADKSQAVDEPGGILRGYQMTYVPDNIKNVGRQCGIIFYVPAAYTSKIDPTTGFINAFKRDVVSTNDAKENFLMKFDSIQYDIEKGLFKFSFDYKNFATHKLTLAKTKWDVYTNGTRIQNMKVEGHWLSMEVELTTKMKELLDDSHIPYEEGQNILDDLREMKDITTIVNGILEIFWLTVQLRNSRIDNPDYDRIISPVLNNDGEFFDSDEYNSYIDAQKAPLPIDADANGAFCIALKGMYTANQIKENWVEGEKLPADCLKIEHASWLAFMQGERG

SEQ ID NO: 954 - protein, 1295 aa, Limihaloglobus sulfuriphilus
MSAVFKIKESTMKDFTHQYSLSKTLRFELKPVGETAERIEDFKNQGLKSIVEEDRQRAEDYKKMKRILDDYHKEFIEEVLNDDIFTANEMESAFEVYRKYMASKNDDKLKKEITEIFTDLRKKIAKAFENKSKEYCLYKGDFSKLINEKKTGKDKGPGKLWYWLKAKADAGVNEFGDGQTFEQAEEALAKFNNFSTYFTGFNQNRDNIYTDAEQQTAISYRVINENMTRYFDNCIRYSSIENKYPELVKQLEPLSGKFAPGNYKDYLSQTAIDIYNEAVGHKSDDINAKGINQFINEYRQRNSIKGRELPIMSVLYKQILSDINKDLIIDKFENAGELLDAVKTLHRELTDKKILLKIKQTLNEFLTEDNSEDIYIKSGTDLTAVSNAIWGEWSVIPKALEMYAENITDMNAKAREKWLKREAYHLKTVQEAIEAYLKDNEEFETRNISEYFTNFKSGENDLIQVVQSAYAKMESIFGIEDFHKDRRPVTESGEPGEGFRQVELVREYLDSLINVEHFIKPLHMFRSGKPIELEDCNSNFYDPLNEAYKELDVVFGIYNKVRNYVTQKPYSKDKFKINFQNSTLLDGWDVNKESANSSVLLLKNGKYYLGVMKQGASNILNYRPEPSDSKNKINAKKQLSEIALAGATDDYYEKMIYKLLPDPAKMLPKVFFSAKNIEFYNPSQEIIYIRENGLFKKDAGDKESLKKWIGFMKTSLLKHPEWGSYFNFEFEPAEDYQDISIFYKQVAEQGYSVTFDKIKTSYIEEKVASGELYLFEIYNKDFSPHSKGRPNLHTMYWKSLFEKENLQNLVTKLNGEAEVFFRQHSIKRNEKVVHRANRPIQNKNPLTEKKQSIFEYDLVKDRRFTKDKFFLHCPITLNFKEAGPGRFNDKVNKYIAGNPDIRIIGIDRGERHLLYYSLIDQSGRIVEQGTLNQITSTLNSGGREIPKTTDYRGLLDTKEKERDKARKSWSMIENIKELKSGYLSHIVHKLAKLMVKNNAVVVLEDLNFGFKRGRFKVEKQVYQKFEKALIEKLNYLVFKDARPAEPGHYLNAYQLTAPLESFKKLGKQSGFIYYVPAWNTSKIDPVTGFVNQFYIEKNSMQYLKNFFGKFDSIRFNPDKNYFEFGFDYKNFHNKAAKSKWTICTHGDKRSWYNRKQRKLEIHNVTENLASLLSGKGINFADGGSIKDKILSVDDASFFKSLAFNFKLTAQLRHTFEDNGEEIDCIISPVAAADGTFFCSETAKKLNMELPHDADANGAYNIARKGLMVLRQIRESGKPKPISNADWLDFAQQNED

SEQ ID NO: 955 - protein, 1245 aa, Ruminococcus bromii
MQERKKISHLTHRNSVQKTIRMQLNPVGKTMDYFQAKQILENDEKLKENYQKIKEIADRFYRNLNEDVLSKTGLDKLKDYAEIYYHCNTDAERKRLDECASELRKEIVKNFKNRDEYNKLFNKKMIEIVLPQHLKNEDEKEVVASFKNFTTYFTGFFTNRKNMYSDGEESTAIAYRCINENLPKHLDNVKAFEKAISKLSKNAIDDLDATYSGLCGTNLYDVFTVDYFNFLLPQSGITEYNKIIGGYTTSDGTKVKGINEYINLYNQQVSKRDKIPNLKILYKQILSESEKVSFIPPKFEDDNELLSAVSEFYANDETFDGMPLKKAIDETKLLFGNLDNSSLNGIYIQNDRSVTNLSNSMFGSWSVIEDLWNKNYDSVNSNSRIKDIQKREDKRKKAYKAEKKLSLSFLQVLISNSENDEIREKSIVNYYKTSLMQLTDNLSDKYNEAAPLLNKSYANEKGLKNDDKSISLIKNFLDAIKEIEKFIKPLSETNITGEKNDLFYSQFTPLLDNISRIDILYDKVRNYVTQKPFSTDKIKLNFGNSQLLNGWDRNKEKDCGAVWLCRDEKYYLAIIDKSNNSILENIDFQDCDENDCYEKIIYKLLPGPNKMLPKVFFSEKCKKLLSPSDEILKIRKNGTFKKGDKFSLDDCHKLIDFYKESFKKYPNWLIYNFKFKNTNEYNDIREFYNDVASQGYNISKMKIPTSFIDKLVDEGKIYLFQLYNKDFSPHSKGTPNLHTLYFKMLFDERNLEDVVYKLNGEAEMFYRPASIKYDKPTHPKNTPIKNKNTLNDKKTSTFPYDLIKDKRYTKWQFSLHFPITMNFKAPDRAMINDDVRNLLKSCNNNFIIGIDRGERNLLYVSVIDSNGAIIYQHSLNIIGNKFKGKTYETNYREKLATREKERTEQRRNWKAIESIKELKEGYISQAVHVICQLVVKYDAIIVMEKLTDGFKRGRTKFEKQVYQKFEKMLIDKLNYYVDKKLDPDEGGGLLHAYQLTNKLESFDKLGMQSGFIFYVRPDFTSKIDPVTGFVNLLYPRYENIDKAKDMISRFDDIGYNAGEDFFEFDIDYDKFPKTASDYRKRWTICTNGERIEAFRNPAKNNEWSYRTIILAEKFKELFDNNSINYRDSDDLKAEILSQTKGKFFEDFFKLLRLTLQMRNSNPETGEDRILSPVKDKNGNFYDSSKYDEKSKLPCDADANGAYNIARKGLWIVEQFKKSDNVSTVGPVIHNDKWLKFVQENDMANN

SEQ ID NO: 956 - protein, 1281 aa, Prevotella sp.
MNILKENYMKEIKELTGLYSLTKTIGVELKPVGKTQELIEAKKLIEQDDQRAEDYKIVKDIIDRYHKDFIDKCLNCVKIKKDDLEKYVSLAENSNRDAEDFDKIKTKMRNQITEAFRKNSLFTNLFKKNLIKEYLPAFVSEEEKSVVNKFSKFTTYFDAFNDNRKNLYSGDAKSGTIAYRLIHENLPMFLDNIASFNAISGIGVNEYFSSIETEFTDTLEGKRLTEFFQIDFFNNTLTQKKIGNYNYIVGAVNKAVNLYKQQHKTVRVPLLKPLYKMILSDRVTPSWLPERFESDEEMLTAIKAAYESLREVLVGDNDESLRNLLLNIEHYDLEHIYIANDSGLTSISQKIFGCYDTYTLAIKDQLQRDYPATKKQREAPDLYDERIDKLYKKVGSFSIAYLNRLVDAKGHFTINEYYKQLGAYCREEGKEKDDFFKRIDGAYCAISHLFFGEHGEIAQSDSDVELIQKLLEAYKGLQRFIKPLLGHGDEADKDNEFDAKLRKVWDELDIITPLYDKVRNWLSRKIYNPEKIKLCFENNGKLLSGWVDSRTKSDNGTQYGGYIFRKKNEIGEYDFYLGISADTKLFRRDAAISYDDGMYERLDYYQLKSKTLLGNSYVGDYGLDSMNLLSAFKNAAVKFQFEKEVVPKDKENVPKYLKRLKLDYAGFYQILMNDDKVVDAYKIMKQHILATLTSSIRVPAAIELATQKELGIDELIDEIMNLPSKSFGYFPIVTAAIEEANKRENKPLFLFKMSNKDLSYAATASKGLRKGRGTENLHSMYLKALLGMTQSVFDIGSGMVFFRHQTKGLAETTARHKANEFVANKNKLNDKKKSIFGYEIVKNKRFTVDKYLFKLSMNLNYSQPNNNKIDVNSKVREIISNGGIKNIIGIDRGERNLLYLSLIDLKGNIVMQKSLNILKDDHNAKETDYKGLLTEREGENKEARRNWKKIANIKDLKRGYLSQVVHIISKMMVEYNAIVVLEDLNPGFIRGRQKIERNVYEQFERMLIDKLNFYVDKHKGANETGGLLHALQLTSEFKNFKKSEHQNGCLFYIPAWNTSKIDPATGFVNLFNTKYTNAVEAQEFFSKFDEIRYNEEKDWFEFEFDYDKFTQKAHGTRTKWTLCTYGMRLRSFKNSAKQYNWDSEVVALTEEFKRILGEAGIDIHENLKDAICNLEGKSQKYLEPLMQFMKLLLQLRNSKAGTDEDYILSPVADENGIFYDSRSCGDQLPENADANGAYNIARKGLMLIEQIKNAEDLNNVKFDISNKAWLNFAQQKPYKNG

SEQ ID NO: 957 - protein, 1293 aa, Unknown
  Description of Unknown: Parcubacteria group bacterium Gr01-1014_33 sequence
MAKENIFNELTGKYQLSKTLRLELKPVGNTQQMLKDEDVFEKDRIIREKYRETRPHFDRLHREFIEQALKNQKLSDLGKYFQCLAKLQNNKKDKEAQEEFKRISQNLRKEVNDLFKIDPLFGEGVFALLKEKYGEKDDAFLREQDGQYVLDENKKKISIFDSWKGFTGYFTKFQETRKNFYKDDGTATAVATRIIDQNLKRFCENIQIFKSIQKKVDFKEVEDNFSVDLEDIFSLGFYSSCFLQEGIDVYNKILGGEPKTTGEKLRGLNELINRYRQDHKGEKLPFFKMLDKQILSEKEKFIESIEDDEELLKTLKEFYSSAEEKTTVLKELFNDFIKNNENYDLSEIYISREALNTISHRWVSAATLPEFEKSVYEVMKKDKPSGLSFDKDDNSYKFPDFIALSYIKGSFEKLSGEKLWKDGYFRDETRNGDKGFLIGNESLWTQFIKIFEFEFNSLFEAKNTERSVGYYHFKKDFEKIITNDFSVNPEDKVIIREFADNVLAIYQMAKYFAIEKKRKWMDQYDTGDFYNHPDFGYKTKFYDNAYEKIVKARMLLQSYLTKKPFSTDKWKLNFECGYLLNGWSSSFNTYGSLLFRTGNEYYLGVVNGSALRTEKIKRLTGNITEANSCHKMVYDFQKPDNKNVPRIFIRSKGDKFAPAVSELNLPVDSILEIYDKGLFKTENKNSPFFKPSLKKLIDYFKLGFSRHASYKHYQFKWKDSSEYKNISEFYNDTIRSCYQIKWEELNFEEVKKLTNSKDLFLFQIYNKDFSEKSTGNKNLHSIYFDGLFLDNNINAQDGVILKLSGGGEIFFRPKTDVKKLGSRTDTKGKLVIKNKRYSQDKIFLHFPIELNYSNTQESNFNKLVRNFLADNPDINIIGVDRGEKHLIYYAGIDQKGNTLKDKDDKDVLGSLNEINGVNYYKLLEERAKAREKARQDWQNIQGIKDLKMGYISLVVRKLADLIIEYNAILVLEDLNMRFKQIHGGIEKSVYQQLEKALIEKLNFLVNKGEKDPERAGHLLRAYQLTAPFSTFKDMGKQTGVLFYTQASYTSKTCPQCGFRPNIKLHFDNLENAKKMLEKINIVYKDNHFEIGYKVSDFTKTEKTSRGNILYGDRQGKDTFVISSKAAIRYKWFARNIKNNELNRGESLKEHTEKGVTIQYDITECLKILYEKNGIDHSGDITKQSIRSELPAKFYKDLLFYLYLLTNTRSSISGTEIDYINCPDCGFHSEKGFNGCIFNGDANGAYNIARKGMLILKKINQYKDQHHTMDKMGWGDLFIGIEEWDKYTQVVSRS

SEQ ID NO: 958 - protein, 1273 aa, Prevotella sp.
MKEIKELTGLYSLTKTIGVELKPVGKTQELIEAKKLIEQDDQRAEDYKIVKDIIDRYHKDFIDKCLNCVKIKKDDLEKYVSLAENSNRDAEDFDKIKTKMRNQITEAFRKNSLFTNLFKKNLIKEYLPAFVSEEEKSVVNKFSKFTTYFDAFNDNRKNLYSGDAKSGTIAYRLIHENLPMFLDNIASFNAISGIGVNEYFSSIETEFTDTLEGKRLTEFFQIDFFNNTLTQKKIGNYNYIVGAVNKAVNLYKQQHKTVRVPLLKPLYKMILSDRVTPSWLPERFESDEEMLTAIKAAYESLREVLVGDNDESLRNLLLNIEHYDLEHIYIANDSGLTSISQKIFGCYDTYTLAIKDQLQRDYPATKKQREAPDLYDERIDKLYKKVGSFSIAYLNRLVDAKGHFTINEYYKQLGAYCREEGKEKDDFFKRIDGAYCAISHLFFGEHGEIAQSDSDVELIQKLLEAYKGLQRFIKPLLGHGDEADKDNEFDAKLRKVWDELDIITPLYDKVRNWLSRKIYNPEKIKLCFENNGKLLSGWVDSRTKSDNGTQYGGYIFRKKNEIGEYDFYLGISADTKLFRRDAAISYDDGMYERLDYYQLKSKTLLGNSYVGDYGLDSMNLLSAFKNAAVKFQFEKEVVPKDKENVPKYLKRLKLDYAGFYQILMNDDKVVDAYKIMKQHILATLTSSIRVPAAIELATQKELGIDELIDEIMNLPSKSFGYFPIVTAAIEEANKRENKPLFLFKMSNKDLSYAATASKGLRKGRGTENLHSMYLKALLGMTQSVFDIGSGMVFFRHQTKGLAETTARHKANEFVANKNKLNDKKKSIFGYEIVKNKRFTVDKYLFKLSMNLNYSQPNNNKIDVNSKVREIISNGGIKNIIGIDRGERNLLYLSLIDLKGNIVMQKSLNILKDDHNAKETDYKGLLTEREGENKEARRNWKKIANIKDLKRGYLSQVVHIISKMMVEYNAIVVLEDLNPGFIRGRQKIERNVYEQFERMLIDKLNFYVDKHKGANETGGLLHALQLTSEFKNFKKSEHQNGCLFYIPAWNTSKIDPATGFVNLFNTKYTNAVEAQEFFSKFDEIRYNEEKDWFEFEFDYDKFTQKAHGTRTKWTLCTYGMRLRSFKNSAKQYNWDSEVVALTEEFKRILGEAGIDIHENLKDAICNLEGKSQKYLEPLMQFMKLLLQLRNSKAGTDEDYILSPVADENGIFYDSRSCGDQLPENADANGAYNIARKGLMLIEQIKNAEDLNNVKFDISNKAWLNFAQQKPYKNG

SEQ ID NO: 959 - protein, 1300 aa, Acinetobacter indicus
MNFQPFFQKFVHLYPISKTLRFELIPQGATQKFISEKQVLLQDEIRARKYPEMKQAIDGYHKDFIQRALSNIDSQVFEQALNTFEDLFLRSQAERATDAYKKDFETAQTKLRELIVHSFEKGEFKQEYKSLFDKNLITNLLKPWVEQQNQIGDSNYTYHEDFNKFTTYFLGFHENRKNIYSKDPHKTALAYRLIHENLPKFLENNKILLKIQNDHPSLWEQLQTLNQTMPQLFDGWDFSQLMQVSFFSNTLTQTGIDQYNTIIGGISEGENRQKIQGINELINLYNQKQDKKNRVAKLKQLYKQILSDRSTLSFLPEKFVDDTELYHAINMFYLEHLHHQSMINGHSYTLLERVQLLINELANYDLSKVYLAPNQLSTVSHQMFGDFGYIGRALNYYYMQVIQPDYEQLLASAKTTKKIEATEKLKTIFLDTPQSLVVIQAAIDEYIQLQPSTKPHTQLTDFIISLLKQYETVADDQSIKVINVFSDIEGKYSCIKGLVNTKSESKREVLQDEKLATDIKAFMDAVNNVIKLLKPFSLNEKLVASVEKDARFYSDFEEIYQSLLIFVPLYNKVRNYITQKPYSTEKFKLNFNKPTLLSGWDANKEADNLSILLRKNGNYYLAIMDTAKGANKAFEPKTLNQLKVDDTTDCYEKMVYKLLSGPSKMFPKAFKAKNNEGNYYPTPELLTSYNNNEHLKNDKNFTLASLHAYIDWCKEYINRNPSWHQFNFKFSPTQSFQDISQFYSEVSSQSYKVHFQTIPSDYIDQLVAEGKLYLFQIYNKDFSPNAKGKENLHTLYFKALFSDENLKQPVFKLSGEAEMFYRPASLQLANTTIHKAGEPMAAKNPLTPNATRTLAYDIIKDRRFTTDKYLLHVPISLNFHAQESMSIKKHNDLVRQMIKHNHQDLHVIGIDRGEKHLLYVSVIDLKGNIVYQESLNSIKSEAQNFETPYHQLLQHREEGRAQARTAWGKIENIKELKDGYLSQVVHRIQQLILKYNAIVMLEDLNFGFKRGRFKIEKQIYQKFEKALIHKLNYVVDKSTQADELGGVRKAYQLTAPFESFEKLGKQSGVLFYVPAWNTSKIDPVTGFVDLLKPKYENLDKAQAFFNAFDSIHYNAQKNYFEFKVNLKQFAGLKAQAAQAEWTICSYGDERHVYQKKNAQQGETVIVNVTEELKVLFAKNNIEVAQSVELKETICTQTQVDFFKRLMWLLQVLLALRYSSSKDKLDYILSPVANAQGEFFDSRHASVQLPQDSDANGAYHIALKGLWVIEQLKAADNLDKVKLAISNDDWLHFAQQKPYLA

SEQ ID NO: 960 - protein, 1205 aa, Pseudobutyrivibrio xylanivorans
MYYQGLTKLYPISKTIRNELIPVGKTLEHIRMNNILEADIQRKSDYERVKKLMDDYHKQLINESLQDVHLSYVEEAADLYLNASKDKDIVDKFSKCQDKLRKEIVNLLKSHENFPKIGNKEIIKLLQSLSDTEKDYNALDSFSKFYTYFTSYNEVRKNLYSDEEKSSTAAYRLINENLPKFLDNIKAYSIAKSAGVRAKELTEEEQDCLFMTETFERTLTQDGIDNYNELIGKLNFAINLYNQQNNKLKGFRKVPKMKELYKQILSEREASFVDEFVDDEALLTNVESFSAHIKEFLESDSLSRFAEVLEESGGEMVYIKNDTSKTTFSNIVFGSWNVIDERLAEEYDSANSKKKKDEKYYDKRHKELKKNKSYSVEKIVSLSTETEDVIGKYIEKLQADIIAIKETREVFEKVVLKEHDKNKSLRKNTKAIEAIKSFLDTIKDFERDIKLISGSEHEMEKNLAVYAEQENILSSIRNVDSLYNMSRNYLTQKPFSTEKFKLNFNRATLLNGWDKNKETDNLGILLVKEGKYYLGIMNTKANKSFVNPPKPKTDNVYHKVNYKLLPGPNKMLPKVFFAKSNLEYYKPSEDLLAKYQAGTHKKGENFSLEDCHSLISFFKDSLEKHPDWSEFGFKFSDTKKYDDLSGFYREVEKQGYKITYTDIDVEYIDSLVEKDELYLFQIYNKDFSPYSKGNYNLHTLYLTMLFDERNLRNVVYKLNGEAEVFYRPASIGKDELIIHKSGEEIKNKNPKRAIDKPTSTFEYDIVKDRRYTKDKFMLHIPVTMNFGVDETRRFNEVVNDAIRGDDKVRVIGIDRGERNLLYVVVVDSDGTILEQISLNSIINNEYSIETDYHKLLDEKEGDRDRARKNWTTIENIKELKEGYLSQVVNVIAKLVLKYDAIICLEDLNFGFKRGRQKVEKQVYQKFEKMLIDKLNYLVIDKSRSQENPEEVGHVLNALQLTSKFTSFKELGKQTGIIYYVPAYLTSKIDPTTGFANLFYVKYESVEKSKDFFNRFDSICFNKVAGYFEFSFDYKNFTDRACGMRSKWKVCTNGERIIKYRNEEKNSSFDDKVIVLTEEFKKLFNEYGIAFNDCMDLTDAINAIDDASFFRKLTKLFQQTLQMRNSSADGSRDYIISPVENDNGEFFNSEKCDKSKPKDADANGAFNIARKGLWVLEQLYNSSSGEKLNLAMTNAEWLEYAQQHTI

SEQ ID NO: 961 - protein, 1306 aa, Prevotella sp.
MAKNFEDFKRLYPLSKTLRFEAKPIGATLDNIVKSGLLEEDEHRAASYVKVKKLIDEYHKVFIDRVLDNGCLPLDDKGDNNSLAEYYESYVSKAQDEDAIKKFKEIQQNLLSIIAKKLTDDKAYANLFGNKLIESYKDKADKTKLIDSDLIQFINTAESTQLVSMSQDEAKELVKEFWGFTTYFEGFFKNRKNMYTPEEKSTGIAYRLINENLPKFIDNMEAFKKAIARPEIQANMEELYSNFSEYLNVESIQEMFLLDYYNMLLTQKQIDVYNAIIGGKTDDEHDVKIKGINEYINLYNQQHKDDKLPKLKALFKQILSDRNAISWLPEEFNSDQEVLNAIKDCYERLAENVLGDKVLKSLLGSLADYSLDGIFIRNDLQLTDISQKMFGNWGVIQNAIMQNIKHVAPARKHKESEEDYEKRIAGIFKKADSFSISYINDCLNEADPNNAYFVENYFATFGAVNTPTMQRENLFALVQNAYTEVAALLHSDYPTVKHLAQDKANVSKIKALLDAIKSLQHFVKPLLGKGDESDKDERFYGELASLWAELDTVTPLYNMIRNYMTRKPYSQKKIKLNFENPQLLGGWDANKEKDYATIILRRNGLYYLAIMDKDSRKLLGKAMPSDGECYEKMVYKFFKDVTTMIPKCSTQLKDVQAYFKVNTDDYVLNSKAFNRPLTITKEVFDLNNVLYGKYKKFQKGYLTATGDNVGYTHAVNVWIKFCMDFLDSYDSTCIYDFSSLKPESYLSLDSFYQDVNLLLYKLSFTDVSASFIDQLVEEGKMYLFQIYNKDFSEYSKGTPNMHTLYWKALFDERNLADVVYKLNGQAEMFYRKKSIENTHPTHPANHPILNKNKDNKKKESLFEYDLIKDRRYTVDKFMFHVPITMNFKSSGSENINQDVKAYLRHADDMHIIGIDRGERHLLYLVVIDLQGNIKEQFSLNEIVNDYNGNTYHTNYHDLLDVREDERLKARQSWQTIENIKELKEGYLSQVIHKITQLMVRYHAIVVLEDLSKGFMRSRQKVEKQVYQKFEKMLIDKLNYLVDKKTDVSTPGGLLNAYQLTCKSDSSQKLGKQSGFLFYIPAWNTSKIDPVTGFVNLLDTHSLNSKEKIKAFFSKFDAIRYNKDKKWFEFNLDYDKFGKKAEDTRTKWTLCTRGMRIDTFRNKEKNSQWDNQEVDLTTEMKSLLEHYYIDIHGNLKDAISTQTDKAFFTGLLHILKLTLQMRNSITGTETDYLVSPVADENGIFYDSRSCGDQLPENADANGAYNIARKGLMLVEQIKDAEDLDNVKFDISNKAWLNFAQQKPYKNG

SEQ ID NO: 962 - protein, 1306 aa, Prevotella copri
MAKNFEDFKRLYSLSKTLRFEAKPIGATLDNIVKSGLLDEDEHRAASYVKVKKLIDEYHKVFIDRVLDDGCLPLENKGNNNSLAEYYESYVSRAQDEDAKKKFKEIQQNLRSVIAKKLTEDKAYANLFGNKLIESYKDKEDKKKIIDSDLIQFINTAESTQLDSMSQDEAKELVKEFWGFVTYFYGFFDNRKNMYTAEEKSTGIAYRLVNENLPKFIDNIEAFNRAITRPEIQENMGVLYSDFSEYLNVESIQEMFQLDYYNMLLTQKQIDVYNAIIGGKTDDEHDVKIKGINEYINLYNQQHKDDKLPKLKALFKQILSDRNAISWLPEEFNSDQEVLNAIKDCYERLAENVLGDKVLKSLLGSLADYSLDGIFIRNDLQLTDISQKMFGNWGVIQNAIMQNIKRVAPARKHKESEEDYEKRIAGIFKKADSFSISYINDCLNEADPNNAYFVENYFATFGAVNTPTMQRENLFALVQNAYTEVAALLHSDYPTVKHLAQDKANVSKIKALLDAIKSLQHFVKPLLGKGDESDKDERFYGELASLWAELDTVTPLYNMIRNYMTRKPYSQKKIKLNFENPQLLGGWDANKEKDYATIILRRNGLYYLAIMDKDSRKLLGKAMPSDGECYEKMVYKFFKDVTTMIPKCSTQLKDVQAYFKVNTDDYVLNSKAFNKPLTITKEVFDLNNVLYGKYKKFQKGYLTATGDNVGYTHAVNVWIKFCMDFLNSYDSTCIYDFSSLKPESYLSLDAFYQDANLLLYKLSFARASVSYINQLVEEGKMYLFQIYNKDFSEYSKGTPNMHTLYWKALFDERNLADVVYKLNGQAEMFYRKKSIENTHPTHPANHPILNKNKDNKKKESLFDYDLIKDRRYTVDKFMFHVPITMNFKSVGSENINQDVKAYLRHADDMHIIGIDRGERHLLYLVVIDLQGNIKEQYSLNEIVNEYNGNTYHTNYHDLLDVREEERLKARQSWQTIENIKELKEGYLSQVIHKITQLMVRYHAIVVLEDLSKGFMRSRQKVEKQVYQKFEKMLIDKLNYLVDKKTDVSTPGGLLNAYQLTCKSDSSQKLGKQSGFLFYIPAWNTSKIDPVTGFVNLLDTHSLNSKEKIKAFFSKFDAIRYNKDKKWFEFNLDYDKFGKKAEDTRTKWTLCTRGMRIDTFRNKEKNSQWDNQEVDLTTEMKSLLEHYYIDIHGNLKDAISAQTDKAFFTGLLHILKLTLQMRNSITGTETDYLVSPVADENGIFYDSRSCGNQLPENADANGAYNIARKGLMLIEQIKNAEDLNNVKFDISNKAWLNFAQQKPYKNG

SEQ ID NO: 963 - protein, 1274 aa, Prevotella copri
MAKNFEDFKRLYSLSKTLRFEAKPIGATLDNIVKSDLLDEDEHRAASYVKVKKLIDEYHKVFIDRVLDDGCLPLENKGNNNSLAEYYESYVSRAQDEDAKKKFKEIQQNLRSVIAKKLTEDKAYANLFGNKLIESYKDKEDKKKIIDSDLIQFINTAESTQLDSMSQDEAKELVKEFWGFVTYFYGFFDNRKNMYTAEEKSTGIAYRLVNENLPKFIDNIEAFNRAITRPEIQENMGVLYSDFSEYLNVESIQEMFQLDYYNMLLTQKQIDVYNAIIGGKTDDEHDVKIKGINDYINLYNQKHKDDKLPKLKALFKQILSDRNAISWLPEEFNSDQEVLNAIKDCYERLSENVLGDKVLKSMLGSLADYSLDGIFIRNDLQLTDISQKMFGNWSVIQNAIMQNIKHVAPARKHKESEEEYENRIAGIFKKADSFSISYIDACLNETDPNNAYFVENYFATLGAVDTPTMQRENLFALVQNAYTEITALLHSDYPTEKNLAQDKANVAKIKALLDAIKSLQHFVKPLLGKGDESDKDERFYGELASLWAELDTMTPLYNMIRNYMTRKPYSQKKIKLNFENPQLLGGWDANKEKDYATIILRRNGLYYLAIMNKDSKKLLGKAMPSDGECYEKMVYKLLPGANKMLPKVFFAKSRMEDFKPSKELVEKYYNGTHKKGKNFNIQDCHNLIDYFKQSIDKHEDWSKFGFKFSDTSTYEDLSGFYREVEQQGYKLSFARVSVSYINQLVEEGKMYLFQIYNKDFSEYSKGTPNMHTLYWKALFDERNLADVVYKLNGQAEMFYRKKSIENTHPTHPANHPILNKNKDNKKKESLFGYDLIKDRRYTVDKFLFHVPITMNFKSSGSENINQDVKAYLRHADDMHIIGIDRGERHLLYLVVIDLQGNIKEQFSLNEIVNDYNGNTYHTNYHDLLDVREDERLKARQSWQTIENIKELKEGYLSQVIHKITQLMVKYHAIVVLEDLNMGFMRGRQKVEKQVYQKFEKMLIEKLNYLVDKKADASVSGGLLNAYQLTSKFDSFQKLGKQSGFLFYIPAWNTSKIDPVTGFVNLLDTRYQNVEKAKSFFSKFDAIRYNKDKEWFEFNLDYDKFGKKAEGTRTKWTLCTRGMRIDTFRNKEKNSQWDNQEVDLTAEMKSLLEHYYIDIHSNLKDAISAQTDKAFFTGLLHILKLTLQMRNSITGTETDYLVSPVVDENGIFYDSRSCGDELPENADANGAYNIARKGLMMIEQIKDAKDLDNLKFDISNKAWLNFAQQKPYKNG

SEQ ID NO: 964 - protein, 1251 aa, Moraxella bovoculi
MLFQDFTHLYPLSKTVRFELKPIGRTLEHIHAKNFLSQDETMADMYQKVKVILDDYHRDFIADMMGEVKLTKLAEFYDVYLKFRKNPKDDELQKQLKDLQAVLRKESVKPIGNGGKYKAGHDRLFGAKLFKDGKELGDLAKFVIAQEGKSSPKLAHLAHFEKFSTYFTGFHDNRKNMYSDEDKHTAIAYRLIHENLPRFIDNLQILTTIKQKHSALYDQIINELTASGLDVSLASHLDGYHKLLTQEGITAYNRIIGEVNGYTNKHNQICHKSERIAKLRPLHKQILSDGMGVSFLPSKFADDSEMCQAVNEFYRHYADVFAKVQSLFDGFDDHQKDGIYVEHKNLNELSKQAFGDFALLGRVLDGYYVDVVNPEFNERFAKAKTDNAKAKLTKEKDKFIKGVHSLASLEQAIKHHTARHDDESVQAGKLGQYFKHGLAGVDNPIQKIHNNHSTIKGFLERERPAGERALPKIKSGKNPEMTQLRQLKELLDNALNVAHFAKLLMTKTTLDNQDGNFYGEFGVLYDELAKIPTLYNKVRDYLSQKPFSTEKYKLNFGNPTLLNGWDLNKEKDNFGVILQKDGCYYLALLDKAHKKVFDNAPNTGKNVYQKMIYKLLPGPNKMLPRVFFAKSNLDYYNPSAELLDKYAQGTHKKGDNFNLKDCHALIDFFKAGINKHPEWQNFGFKFSPTSSYRDLSDFYREVEPQGYQVKFVDINADYIDELVEQGQLYLFQIYNKDFSPKAHGKPNLHTLYFRALFSEDNLANPIYKLNGEAQIFYRKASLGMNETTIHRAGEILENKNPDNPKERVFTYDIIKDRRYTQDKFMLHVPITMNFGVQGMTIKEFNKKVNQSIRQYDDVNVIGIDRGERHLLYLTVINSKGEILEQRSLNDITTASANGTQMTTPYHKILDKREIERLNARVGWGEIETIKELKSGYLSHVVHQVSQLMLKYNAIVVLEDLNFGFKRGRFKVEKQIYQNFENALIKKLNHLELKDKADDEIGSYKNALQLTNNFTDLKNIGKQTGFLFYVPAWNTSKIDPETGFVDLLKPRYENIAQSQAFFGKFDKICYNADKDYFEFHIDYAKFTDKAKNSRQTWTICSHGDKRYVYDKTANQNKGATKGINVNDELKSLFARYHINEKQPNLVMDICQNNDKEFHKSLMYLLKTLLALRYSNASSDEDFILSPVANDEGVFFNSALADDTQPQNADANGAYHIALKGLWLLNELKNSDDLNKVKLAIDNQTWLNFAQNR

SEQ ID NO: 965 - protein, 1251 aa, Moraxella lacunata
MLFQDFTHLYPLSKTVRFELKPIGKTLEHIHAKNFLSQDETMADMYQKVKAILDDYHRDFITKMMSEVTLTKLPEFYEVYLALRKNPKDDTLQKQLTEIQTALREEVVKPIDSGGKYKAGYERLFGAKLFKDGKELGDLAKFVIAQEGESSPKLPQIAHFEKFSTYFTGFHDNRKNMYSSDDKHTAIAYRLIHENLPRFIDNLQILVTIKQKHSVLYDQIVNELNANGLDVSLASHLDGYHKLLTQEGITAYNRIIGEVNSYTNKHNQICHKSERIAKLRPLHKQILSDGMGVSFLPSKFADDSEMCQAVNEFYRHYAHVFAKVQSLFDRFDDYQKDGIYVEHKNLNELSKQAFGDFALLGRVLDGYYVDVVNPEFNDKFAKAKTDNAKEKLTKEKDKFIKGVHSLASLEQAIEHYIAGHDDESVQAGKLGQYFKHGLAGVDNPIQKIHNSHSTIKGFLERERPAGERTLPKIKSDKSLEMTQLRQLKELLDNALNVVHFAKLLTTKTTLDNQDGNFYGEFGALYDELAKIATLYNKVRDYLSQKPFSTEKYKLNFGNPTLLNGWDLNKEKDNFGVILQKDGCYYLALLDKAHKKVFDNAPNTGKSVYQKMVYKLLPGPNKMLPKVFFAKSNLDYYNPSAELLDKYAQGTHKKGDNFNLKDCHALIDFFKASINKHPEWQHFGFEFSLTSSYQDLSDFYREVEPQGYQVKFVDIDADYIDELVEQGQLYLFQIYNKDFSPKAHGKPNLHTLYFKALFSEDNLANPIYKLNGEAEIFYRKASLDMNETTIHRAGEVLENKNPDNPKERQFVYDIIKDKRYTQDKFMLHVPITMNFGVQGMTIKEFNKKVNQSIQQYDEVNVIGIDRGERHLLYLTVINSKGEILEQRSLNDIITTSANGTQMTTPYHKILDKREIERLNARVGWGEIETIKELKSGYLSHVVHQISQLMLKYNAIVVLEDLNFGFKRGRFKVEKQIYQNFENALIKKLNHLVLKDKADNEIGSYKNALQLTNNFTDLKSIGKQTGFLFYVPAWNTSKIDPVTGFVDLLKPRYENIAQSQAFFDKFDKICYNADKGYFEFHIDYAKFTDKAKNSRQIWTICSHGDKRYVYDKTANQNKGATIGINVNDELKSLFARYRINDKQPNLVMDICQNNDKEFHKSLTYLLKALLALRYSNASSDEDFILSPVANDKGVFFNSALADDTQPQNADANGAYHIALKGLWLLNELKNSDDLDKVKLAIDNQTWLNFAQNR

SEQ ID NO: 966 - protein, 1251 aa, Moraxella lacunata
MLFQDFTHLYPLSKTVRFELKPIGKTLEHIHAKNFLSQDETMADMYQKVKAILDDYHRDFITKMMSEVTLTKLPEFYEVYLALRKNPKDDTLQKQLTEIQTALREEVVKPIDSGGKYKAGYERLFGAKLFKDGKELGDLAKFVIAQEGESSPKLPQIAHFEKFSTYFTGFHDNRKNMYSSDDKHTAIAYRLIHENLPRFIDNLQILVTIKQKHSVLYDQIVNELNANGLDVSLASHLDGYHKLLTQEGITAYNRIIGEVNSYTNKHNQICHKSERIAKLRPLHKQILSDGMGVSFLPSKFADDSEMCQAVNEFYRHYAHVFAKVQSLFDRFDDYQKDGIYVEHKNLNELSKQAFGDFALLGRVLDGYYVDVVNPEFNDKFAKAKTDNAKEKLTKEKDKFIKGVHSLASLEQAIEHYIAGHDDESVQAGKLGQYFKHGLAGVDNPIQKIHNSHSTIKGFLERERPAGERTLPKIKSDKSLEMTQLRQLKELLDNALNVVHFAKLLTTKTTLDNQDGNFYGEFGALYDELAKIATLYNKVRDYLSQKPFSTEKYKLNFGNPTLLNGWDLNKEKDNFGVILQKDGCYYLALLDKAHKKVFDNAPNTGKSVYQKMVYKLLPGSNKMLPKVFFAKSNLDYYNPSAELLDKYAQGTHKKGDNFNLKDCHALIDFFKASINKHPEWQHFGFEFSLTSSYQDLSDFYREVEPQGYQVKFVDIDADYIDELVEQGQLYLFQIYNKDFSPKAHGKPNLHTLYFKALFSEDNLANPIYKLNGEAEIFYRKASLDMNETTIHRAGEVLENKNPDNPKERQFVYDIIKDKRYTQDKFMLHVPITMNFGVQGMTIKEFNKKVNQSIQQYDEVNVIGIDRGERHLLYLTVINSKGEILEQRSLNDIITTSANGTQMTTPYHKILDKREIERLNARVGWGEIETIKELKSGYLSHVVHQISQLMLKYNAIVVLEDLNFGFKRGRFKVEKQIYQNFENALIKKLNHLVLKDKADNEIGSYKNALQLTNNFTDLKSIGKQTGFLFYVPAWNTSKIDPVTGFVDLLKPRYENIAQSQAFFDKFDKICYNADKGYFEFHIDYAKFTDKAKNSRQIWTICSHGDKRYVYDKTANQNKGATIGINVNDELKSLFARYRINDKQPNLVMDICQNNDKEFHKSLTYLLKALLALRYSNASSDEDFILSPVANDKGVFFNSALADDTQPQNADANGAYHIALKGLWLLNELKNSDDLDKVKLAIDNQTWLNFAQNR

SEQ ID NO: 967 - protein, 1257 aa, Sodaliphilus pleomorphus
MKYTDFTGIYPVSKTLRFELIPQGSTVENMKREGILNNDMHRADSYKEMKKLIDEYHKVFIERCLSDFSLKYDDTGKHDSLEEYFFYYEQKRNDKTKKIFEDIQVALRKQISKRFTGDTAFKRLFKKELIKEDLPSFVKNDPVKTELIKEFSDFTTYFQEFHKNRKNMYTSDAKSTAIAYRIINENLPKFIDNINAFHIVAKVPEMQEHFKTIADELRSHLQVGDDIDKMFNLQFFNKVLTQSQLAVYNAVIGGKSEGNKKIQGINEYVNLYNQQHKKARLPMLKLLYKQILSDRVAISWLQDEFDNDQDMLDTIEAFYNKLDSNETGVLGEGKLKQILMGLDGYNLDGVFLRNDLQLSEVSQRLCGGWNIIKDAMISDLKRSVQKKKKETGADFEERVSKLFSAQNSFSIAYINQCLGQAGIRCKIQDYFACLGAKEGENEAETTPDIFDQIAEAYHGAAPILNARPSSHNLAQDIEKVKAIKALLDALKRLQRFVKPLLGRGDEGDKDSFFYGDFMPIWEVLDQLTPLYNKVRNRMTRKPYSQEKIKLNFENSTLLNGWDLNKEHDNTSVILRREGLYYLGIMNKNYNKIFDANNVETIGDCYEKMIYKLLPGPNKMLPKVFFSKSRVQEFSPSKKILEIWESKSFKKGDNFNLDDCHALIDFYKDSIAKHPDWNKFNFKFSDTQSYTNISDFYRDVNQQGYSLSFTKVSVDYVNRMVDEGKLYLFQIYNKDFSPQSKGTPNMHTLYWRMLFDERNLHNVIYKLNGEAEVFYRKASLRCDRPTHPAHQPITCKNENDSKRVCVFDYDIIKNRRYTVDKFMFHVPITINYKCTGSDNINQQVCDYLRSAGDDTHIIGIDRGERNLLYLVIIDQHGTIKEQFSLNEIVNEYKGNTYCTNYHTLLEEKEAGNKKARQDWQTIESIKELKEGYLSQVIHKISMLMQRYHAIVVLEDLNGSFMRSRQKVEKQVYQKFEHMLINKLNYLVNKQYDAAEPGGLLHALQLTSRMDSFKKLGKQSGFLFYIPAWNTSKIDPVTGFVNLFDTRYCNEAKAKEFFEKFDDISYNDERDWFEFSFDYRHFTNKPTGTRTQWTLCTQGTRVRTFRNPEKSNHWDNEEFDLTQAFKDLFNKYGIDIASGLKARIVNGQLTKETSAVKDFYESLLKLLKLTLQMRNSVTGTDIDYLVSPVADKDGIFFDSRTCGSLLPANADANGAFNIARKGLMLLRQIQQSSIDAEKIQLAPIKNEDWLEFAQEKPYL

SEQ ID NO: 968 - protein, 1245 aa, Phocaeicola plebeius
METFSGFTNLYPLSKTLRFRLIPVGETLKYFIGSGILEEDQHRAESYVKVKAIIDDYHRAYIENSLSGFELPLESTGKFNSLEEYYLYHNIRNKTEEIQNLSSKVRTNLRKQVVAQLTKNEIFKRIDKKELIQSDLIDFVKNEPDANEKIALISEFRNFTVYFKGFHENRRNMYSDEEKSTSIAFRLIHENLPKFIDNMEVFAKIQNTSISENFDAIQKELCPELVTLCEMFKLGYFNKTLSQKQIDAYNTVIGGKTTSEGKKIKGLNEYINLYNQQHKQEKLPKMKLLFKQILSDRESASWLPEKFENDSQVVGAIVNFWNTIHDTVLAEGGLKTIIASLGSYGLEGIFLKNDLQLTDISQKATGSWGKISSEIKQKIEVMNPQKKKESYETYQERIDKIFKSYKSFSLAFINECLRGEYKIEDYFLKLGAVNSSSLQKENHFSHILNTYTDVKEVIGFYSESTDTKLIRDNGSIQKIKLFLDAVKDLQAYVKPLLGNGDETGKDERFYGDLIEYWSLLDLITPLYNMVRNYVTQKPYSVDKIKINFQNPTLLNGWDLNKETDNTSVILRRDGKYYLAIMNNKSRKVFLKYPSGTDRNCYEKMEYKLLPGANKMLPKVFFSKSRINEFMPNERLLSNYEKGTHKKSGTCFSLDDCHTLIDFFKKSLDKHEDWKNFGFKFSDTSTYEDMSGFYKEVENQGYKLSFKPIDATYVDQLVDEGKIFLFQIYNKDFSEHSKGTPNMHTLYWKMLFDETNLGDVVYKLNGEAEVFFRKASINVSHPTHPANIPIKKKNLKHKDEERILKYDLIKDKRYTVDQFQFHVPITMNFKADGNGNINQKAIDYLRSASDTHIIGIDRGERNLLYLVVIDGNGKICEQFSLNEIEVEYNGEKYSTNYHDLLNVKENERKQARQSWQSIANIKDLKEGYLSQVIHKISELMVKYNAIVVLEDLNAGFMRGRQKVEKQVYQKFEKKLIEKLNYLVFKKQSSDLPGGLMHAYQLANKFESFNTLGKQSGFLFYIPAWNTSKMDPVTGFVNLFDVKYESVDKAKSFFSKFDSIRYNVERDMFEWKFNYGEFTKKAEGTKTDWTVCSYGNRIITFRNPDKNSQWDNKEINLTENIKLLFERFGIDLSSNLKDEIMQRTEKEFFIELISLFKLVLQMRNSWTGTDIDYLVSPVCNENGEFFDSRNVDETLPQNADANGAYNIARKGMILLDKIKKSNGEKKLALSITNREWLSFAQGCCKNG

SEQ ID NO: 969 - protein, 1245 aa, Phocaeicola plebeius
METFSGFTNLYPLSKTLRFRLIPVGETLKHFIDSGILEEDQHRAESYVKVKAIIDDYHRAYIENSLSGFELPLESTGKFNSLEEYYLYHNIRNKTEEIQNLSSKVRTNLRKQVVVQLTKNEIFKRIDKKELIQSDLIDFVKNEPDANEKIALISEFRNFTVYFKGFHENRRNMYSDEEKSTSIAFRLIHENLPKFIDNMEVFAKIQNTSISENFDAIQKELCPELVTLCEMFKLGYFNKTLSQKQIDAYNTVIGGKTTSEGKKIKGLNEYINLYNQQHKQEKLPKMKLLFKQILSDRESASWLPEKFENDSQVVGAMVNFWNTIHDTVLAEGGLKTIIASLGSYGLEGIFLKNDLQLTDISQKATGSWSKISSEIKQKIEVMNPQKKKESYESYQERIDKLFKSYKSFSLAFINECLRGEYKIEDYFLKLGAVNSSSLQKENHFSHILNAYTDVKEAIGFYSESTDTKLIQDNDSIQKIKQFLDAVKDLQAYVKPLLGNGDETGKDERFYGDLIEYWSLLDLITPLYNMVRNYVTQKPYSVDKIKINFQNPTLLNGWDLNKETDNTSVILRRDGKYYLAIMNNKSRKVFLKYPSGTDGNCYEKMEYKLLPGANKMLPKVFFSKSRINEFMPNERLLSNYEKGTHKKSGICFSLDDCHTLIDFFKKSLDKHEDWKNFGFKFSDTSTYEDMSGFYKEVENQGYKLSFKPIDATYVDQLVDEGKIFLFQIYNKDFSEHSKGTPNMHTLYWKMLFDETNLGDVVYKLNGEAEVFFRKASINVSHPTHPANIPIKKKNLKHKDEERILKYDLIKDKRYTVDQFQFHVPITMNFKADGNGNINQKAIDYLCSASDTHIIGIDRGERNLLYLVVIDGNGKICEQFSLNEIEVEYNGEKYSTNYHDLLNVKENERKQARQSWQSIANIKDLKEGYLSQVIHKISELMVKYNAIVVLEDLNAGFMRGRQKVEKQVYQKFEKKLIEKLNYLVFKKQSSDLPGGLMHAYQLANKFESFNALGKQSGFLFYIPAWNTSKMDPVTGFVNLFDVKYESVDKAKSFFSKFDSMRYNVERDMFEWKFNYGEFTKKAEGTKTDWTVCSYGNRIITFRNPDKNSQWDNKEINLTENIKLLFERFGIDLSSNLKDEIMQRTEKEFFIELISLFKLVLQMRNSWTGTDIDYLVSPVCNENGEFFDSRNVDETLPQNADANGAYNIARKGMILLDKIKKSNGEKKLALSITNREWLSFAQGCCKNG

SEQ ID NO: 970 - protein, 1245 aa, Phocaeicola plebeius
METFSGFTNLYPLSKTLRFRLIPVGETLKHFIGSGILEEDQHRAESYVKVKAIIDDYHRTYIENSLSGFELPLESTGKFNSLEEYYLYHNIRNKTEEIQNLSSKVRTNLRKQVVTQLTKNEIFKRIDKKELIQSDLIDFVKNEPDANEKIALISEFRNFTVYFKGFHENRRNMYSDEEKSTSIAFRLIHENLPKFIDNMEVFAKIQNTSISENFDAIQKELCPELVTLCEMFKLGYFNKTLSQKQIDAYNTVIGGKTTSEGKKIKGLNEYINLYNQQHKQEKLPKMKLLFKQILSDRESASWLLEKFENDSQVVGAMVNFWNTIHDTVLAEGGLKTIIASLGSYGLEGIFLKNDLQLTDISQKATGSWSKISSEIKQKIEAMNPQKKKESYESYQERIDKLFKSYKSFSLAFVNECLRGEYKIEDYFLKLGAVNSSLLQKENHFSHILNTYTDVKEVIGFYSESTDTKLIQDNDSIQKIKQFLDAVKDLQAYVKPLLGNSDETGKDERFYGDLIEYWSLLDLITPLYNMVRNYVTQKPYSVDKIKINFQNPTLLNGWDLNKEMDNTSVILRRDGKYYLAIMNNKSRKVFLKYPSGTDRNCYEKMEYKLLPGANKMLPKVFFSKSRINEFMPNERLLSNYEKGTHKKSGTCFSLDDCHTLIDFFKKSLNKHEDWKNFGFKFSDTSTYEDMSGFYKEVENQGYKLSFKPIDATYVDQLVDEGKIFLFQIYNKDFSEHSKGTPNMHTLYWKMLFDETNLGDVVYKLNGEAEVFFRKASINVSHPTHPANIPIKKKNLKHKDEERILKYDLIKDKRYTVDQFQFHVPITMNFKANGNGNINQKAIDYLRSASDTHIIGIDRGERNLLYLVVIDGNGKICEQFSLNEIEVEYNGEKYSTNYHDLLNVKENERKQARQSWQSIANIKDLKEGYLSQVIHKISELMVKYNAIVVLEDLNAGFMRGRQKVEKQVYQKFEKKLIEKLNYLVFKKQSSDLPGGLMHAYQLANKFESFNTLGKQSGFLFYIPAWNTSKMDPVTGFVNLFDVKYESVDKAKSFFSKFDSIRYNVERDMFEWKFNYDEFTKKAEGTKTDWTVCSYGNRIITFRNPDKNSQWDNKEINLTENIKLLFERFGIDLSSNLKDEIMERTEKEFFIELISLFKLVLQMRNSWTGTDIDYLVSPVCNENGEFFDSRNVDETLPQNADANGAYNIARKGMILLDKIKKNNGEKKLTLSITNREWLSFAQGCCKNG

SEQ ID NO: 971 - protein, 1261 aa, Moraxella lacunata
MLFQDFTHLYPLSKTVRFELKPIGKTLEHIHAKNFLSQDKTMADMYQKVKAILDDYHRDFIADMMGEVKLTKLAEFCDVYLKFRKNPKDDGLQKQLKDLQAVLRKEIVKPIGNGGKYKVGYDRLFGAKLFKDGKELGDLAKFVIAQESESSPKLPQIAHFEKFSTYFTGFHDNRKNMYSSDDKHTAIAYRLIHENLPRFIDNLQILATIKQKHSALYDQIASELTASGLDVSLASHLGGYHKLLTQEGITAYNRIIGEVNSYTNKHNQICHKSERIAKLRPLHKQILSDGMGVSFLPSKFADDSEMCQAVNEFYRHYADVFAKVQSLFDRFDDYQKDGIYVEHKNLNELSKRAFGDFGFLKRFLEEYYADVIDPEFNEKFAKTEPDSDEQKKLAGEKDKFVKGVHSLASLEQVIEYYTAGYDDESVQADKLGQYFKHRLAGVDNPIQKIHNSHSTIKGFLERERPAGERALPKIKSDKSPEMTQLRQLKELLDNALNVVHFAKLVSTETVLDTRSDKFYGEFRPLYVELAKITTLYNKVRDYLSQKPFSTEKYKLNFGNPTLLNGWDLNKEKDNFGVILQKDGCYYLALLDKAHKKVFDNAPNTGKSVYQKMVYKQIANARRDLACLLIINGKVVRKTKGLDDLREKYLPYDIYKIYQSESYKVLSPNFNHQDLVKYIDYNKILASGYFEYFDFRFKESSEYKSYKEFLDDVDNCGYKISFCNINADYIDELVEQGQLYLFQIYNKDFSPKAHGKPNLHTLYFKALFSEDNLANPIYKLNGEAQIFYRKASLDMNETTIHRAGEVLENKNPDNPKQRQFVYDIIKDKRYTQDKFMLHVPITMNFGVQGMTIEGFNKKVNQSIQQYDDVNVIGIDRGERHLLYLTVINSKGEILEQRSLNDIITTSANGTQMTTPYHKILNKKKEGRLQARKDWGEIETIKELKAGYLSHVVHQISQLMLKYNAIVVLEDLNFGFKRGRLKVENQVYQNFENALIKKLNHLVLKDKTDDEIGSYKNALQLTNNFTDLKSIGKQTGFLFYVPARNTSKIDPETGFVDLLKPRYENITQSQAFFGKFDKICYNTDKGYFEFHIDYAKFTDEAKNSRQTWVICSHGDKRYVYNKTANQNKGATKGINVNDELKSLFACHHINDKQPNLVMDICQNNDKEFHKSLMYLLKALLALRYSNANSDEDFILSPVANDEGVFFNSALADDTQPQNADANGAYHIALKGLWVLEQIKNSDDLDKVDLEIKDDEWRNFAQNR

SEQ ID NO: 972 - protein, 1275 aa, Unknown
  Description of Unknown: Lachnospiraceae bacterium sequence
MGKNQNFQEFIGVSPLQKTLRNELIPTETTKKNITQLDLLTEDEIRAQNREKLKEMMDDYYRDVIDSTLHAGIAVDWSYLFSCMRNHLRENSKESKRELERTQDSIRSQIYNKFAERADFKDMFGASIITKLLPTYIKQNPEYSERYDESMEILKLYGKFTTSLTDYFETRKNIFSKEKISSAVGYRIVEENAEIFLQNQNAYDRICKIAGLDLHGLDNEITAYVDGKTLKEVCSDEGFAKAITQEGIDRYNEAIGAVNQYMNLLCQKNKALKPGQFKMKRLHKQILCKGTTSFDIPKKFENDKQVYDAVNSFTEIVMKNNDLKRLLNITQNVNDYDMNKIYVAADAYSTISQFISKKWNLIEECLLDYYSDNLPGKGNAKENKVKKAVKEETYRSVSQLNELIEKYYVEKTGQSVWKVESYISRLAETITLELCHEIENDEKHNLIEDDDKISKIKELLDMYMDAFHIIKVFRVNEVLNFDETFYSEMDEIYQDMQEIVPLYNHVRNYVTQKPYKQEKYRLYFNTPTLANGWSKNKEYDNNAIILMRDDKYYLGILNAKKKPSKQTMAGKEDCLEHAYAKMNYYLLPGANKMLPKVFLSKKGIQDYHPSSYIVEGYNEKKHIKGSKNFDIRFCRDLIDYFKECIKKHPDWNKFNFEFSATETYEDISVFYREVEKQGYRVEWTYINSEDIQKLEEDGQLFLFQIYNKDFAVGSTGKPNLHTLYLKNLFSEENLRDIVLKLNGEAEIFFRKSSVQKPVIHKCGSILVNRTYEITESGTTRVQSIPESEYMELYRYFNSEKQIELSDEAKKYLDKVQCNKAKTDIVKDYRYTMDKFFIHLPITINFKVDKGNNVNAIAQQYIAEQEDLHVIGIDRGERNLIYVSVIDMYGRILEQKSFNLVEQVSSQGTKRYYDYKEKLQNREEERDKARKSWKTIGKIKELKEGYLSSVIHEIAQMVVKYNAIIAMEDLNYGFKRGRFKVERQVYQKFETMLISKLNYLADKSQAVDEPGGILRGYQMTYVPDNIKNVGRQCGIIFYVPAAYTSKIDPTTGFINAFKRDVVSTNDAKENFLMKFDSIQYDIEKGLFKFSFDYKNFATHKLTLAKTKWDVYTNGTRIQNMKVEGHWLSMEVELTTKMKELLDDSHIPYEEGQNILDDLREMKDITTIVNGILEIFWLTVQLRNSRIDNPDYDRIISPVLNNDGEFFDSDEYNSYIDAQKAPLPIDADANGAFCIALKGMYTANQIKENWVEGEKLPADCLKIEHASWLAFMQGERG

SEQ ID NO: 973 - protein, 1261 aa, Moraxella sp.
MNTSLFSSFTRQYPVTKTLRFELKPMGATLGHIQQKGFLHKDEELAKIYKKIKELLDEYHRAFIADTLGDAQLVGLDDFYADYQALKQDSKNSHLKDKLTKTQDNLRKQITKNFEKTPQLKERYKRLFTKELFKAGKDKGDLEKWLINHDSEPNKAEKISWIHQFENFTTYFQGFYENRKNMYSDEVKHTAIAYRLIHENLPRFVDNIQVLSKIKSDYPDLYHELNHLDSRTIDFADFKFDDMLQMDFYHHLLIQSGITAYNTLLGGKVLEGGKKLQGINELINLYGQKHKIKIAKLKPLHKQILSDGQSVSFLPKKFDNDYELCQTVNHFYREYVAIFDELVVLFQKFYDYDKDNIYINHQQLNQLSHELFADFRLLSRALDFYYCQIIDGDFNNKINNAKSQNAKEKLLKEKERYTKSNHSINELQKAINHYASHHEDTEVKVISDYFSATNIRNMIDGIHHHFSTIKGFLEKDNNQGESYLPKQKNSNDVKNLKLFLDGVLRLIHFIKPLALKSDDTLEKEEHFYGEFMPLYDKLVMFTLLYNKVRDYISQKPYNDEKIKLNFGNSTLLNGWDVNKEKDNFGVILCKEGLYYLAILDKSHKKVFDNAPKATSSHTYQKMVYKLLPGPNKMLPKVFFAKSNIGYYQPSAQLLENYEKGTHKKGSNFSLTDCHHLIDFFKSSIAKHPEWKEFGFRFSDTHTYQDLSDFYKEIEPQSYKVKFIDIDADYIDDLVEKGQLYLFQLYNKDFSKQSYGKPNLHTLYFKSLFSDDNLKNPIYKLNGEAEIFYRRASLSVSDTTIHQAGEILTPKNPNNTHNRTLSYDVIKNKRYTTDKFFLHIPITMNFGIENTGFKAFNHQVNTTLKNADKKDVHIIGIDRGERHLLYVSVIDGDGRIVEQRTLNDIVSISNNGMSMSTPYHQILDNREKERLAARTDWGDIKNIKELKAGYLSHVVHEVVQMMLKYNAMIVLEDLNFGFKHGRFKVEKQVYQNFENALIKKLNYLVLKNADNHQLGSVRKALQLTNNFTDIKSIGKQTGFIFYVPAWNTSKIDPTTGFVDLLKPRYENMAQAQSFISRFKKIAYNHQLDYFEFEFDYADFYQKTIDKKRIWTLCTYGDVRYYYDHKTKETKTVNITKELKSLLDKHDLSYQNGHNLVDELANSHDKSLLSGVMYLLKVLLALRYSHAQKNEDFILSPVMNKDGVFFDSRFADDVLPNNADANGAYHIALKGLWVLNQIQSADNMDKIDLSISNEQWLHFTQSR

SEQ ID NO: 974 - protein, 1288 aa, Coprococcus sp.
MVGNKISNSFDSFTGINALSKTLRNELIPSDYTKRHIAESDFIAADTNKNEDQYVAKEMMDDYYRDFISKVLDNLHDIEWKNLFELMHKAKIDKSDATSKELIKIQDMLRKKIGKKFSQDPEYKVMLSAGMITKILPKYILEKYETDREDRLEAIKRFYGFTVYFKEFWASRQNVFSDKAIASSISYRIIHENAKIYMDNLDAYNRIKQIACEEIEKIEEEAYDFLQGDQLDVVYTEEAYGRFISQSGIDLYNNICGVINAHMNLYCQSKKCSRSKFKMQKLHKQILCKAETGFEIPLGFQDDAQVINAINSFNALIKEKNIISRLRTIGKSISLYDVNKIYISSKAFENVSVYIDHKWDVIASSLYKYFSEIVKGNKDNREEKIQKEIKKVKSCSLGDLQRLVNSYYKIDSTCLEHEVTEFVTKIIDEIDNFQITDFKFNDKISLIQNEQIVMDIKTYLDKYMSIYHWMKSFVIDELVDKDMEFYSELDELNEDMSEIVNLYNKVRNYVTQKPYSQEKIKLNFGSPTLADGWSKSKEFDNNAIILIRDEKIYLAIFNPRNKPAKTVISGHDVCNSETDYKKMNYYLLPGASKTLPHVFIKSRLWNESHGIPDEILRGYELGKHLKSSVNFDVEFCWKLIDYYKECISCYPNYKAYNFKFADTESYNDISEFYREVECQGYKIDWTYISSEDVEQLDRDGQIYLFQIYNKDFAPNSKGMDNLHTKYLKNIFSEDNLKNIVIKLNGEAELFYRKSSVKKKVEHKKGTILVNKTYKVEDNTENSKEKRVIIESVPDDCYMELVDYWRNGGIGILSDKAVQYKDKVSHYEATMDIVKDRRYTVDKFFIHLPITINFKADGRININEKVLKYIAENDELHVIGIDRGERNLLYVSVINKKGKIVEQKSFNMIESYETVTNIVRRYNYKDKLVNKESARTDARKNWKEIGKIKEIKEGYLSQVIHEISKMVLKYNAIIVMEDLNYGFKRGRFRVERQVYQKFENMLISKLAYLVDKSRKADEPGGVLRGYQLTYIPDSLEKLGSQCGIIFYVPAAYTSKIDPLTGFVNVFNFREYSNFETKLDFVRSLDSIRYDTEKKLFSISFDYDNFKTHNTTLAKTKWVIYLRGERIKKEHTSYGWKDDVWNVESRIKDLFDSSHMKYDDGHNLIEDILELESSVQKKLINELIEIIRLTVQLRNSKSERYDRTEAEYDRIVSPVMDENGRFYDSENYIFNEETELPKDADANGAYCIALKGLYNVIAIKNNWKEGEKFNRKLLSLNNYNWFDFIQNRRF

SEQ ID NO: 975 - protein, 1876 aa, Coprococcus sp.
MVGNKISNSFDSFTGINALSKTLRNELIPSDYTKRHIAESDFIAADTNKNEDQYVAKEMMDDYYRDFISKVLDNLHDIEWKNLFELMHKAKIDKSDATSKELIKIQDMLRKKIGKKFSQDPEYKVMLSAGMITKILPKYILEKYETDREDRLEAIKRFYGFTVYFKEFWASRQNVFSDKAIASSISYRIIHENAKIYMDNLDAYNRIKQIACEEIEKIEEEAYDFLQGDQLDVVYTEEAYGRFISQSGIDLYNNICGVINAHMNLYCQSKKCSRSKFKMQKLHKQILCKAETGFEIPLGFQDDAQVINAINSFNALIKEKNIISRLRTIGKSISLYDVNKIYISSKAFENVSVYIDHKWDVIASSLYKYFSEIVKGNKDNREEKIQKEIKKVKSCSLGDLQRLVNSYYKIDSTCLEHEVTEFVTKIIDEIDNFQITDFKFNDKISLIQNEQIVMDIKTYLDKYMSIYHWMKSFVIDELVDKDMEFYSELDELNEDMSEIVNLYNKVRNYVTQKPYSQEKIKLNFGSPTLADGWSKSKEFDNNAIILIRDEKIYLAIFNPRNKPAKTVISGHDVCNSETDYKKMNYYLLPGASKTLPHVFIKSRLWNESHGIPDEILRGYELGKHLKSSVNFDVEFCWKLIDYYKECISCYPNYKAYNFKFADTESYNDISEFYREVECQGYKIDWTYISSEDVEQLDRDGQIYLFQIYNKDFAPNSKGMDNLHTKYLKNIFSEDNLKNIVIKLNGEAELFYRKSSVKKKVEHKKGTILVNKTYKVEDNTENSKEKRVIIESVPDDCYMELVDYWRNGGIGILSDKAVQYKDKVSHYEATMDIVKDRRYTVDKFFIHLPITINFKADGRININEKVLKYIAENDELHVIGIDRGERNLLYVSVINKKGKIVEQKSFNMIESYETVTNIVRRYNYKDKLVNKESARTDARKNWKEIGKIKEIKEGYLSQVIHEISKMVLKYNAIIVMEDLNYGFKRGRFRVERQVYQKFENMLISKLAYLVDKSRKADEPGGVLRGYQLTYIPDSLEKLGSQCGIIFYVPAAYTSKIDPLTGFVNVFNFREYSNFETKLDFVRSLDSIRYDTEKKLFSISFDYDNFKTHNTTLAKTKWVIYLRGERIKKEHTSYGWKDDVWNVESRIKDLFDSSHMKYDDGHNLIEDILELESSVQKKLINELIEIIRLTVQLRNSKSERYDRTEAEYDRIVSPVMDENGRFYDSENYIFNEETELPKDADANGAYCIALKGLYNVIAIKNNWKEGEKFNRKLLSLNNYNWFDFIQNRRFQIYLFQIYNKDFAPNSKGMDNLHTKYLKNIFSEDNLKNIVIKLNGEAELFYRKSSVKKKVEHKKGTILVNKTYKVEDNTENSKEKRVIIESVPDDCYMELVDYWRNGGIGILSDKAVQYKDKVSHYEATMDIVKDRRYTVDKFFIHLPITINFKADGRININEKVLKYIAENDELHVIGIDRGERNLLYVSVINKKGKIVEQKSFNMIESYETVTNIVRRYNYKDKLVNKESARTDARKNWKEIGKIKEIKEGYLSQVIHEISKMVLKYNAIIVMEDLNYGFKRGRFRVERQVYQKFENMLISKLAYLVDKSRKADEPGGVLRGYQLTYIPDSLEKLGSQCGIIFYVPAAYTSKIDPLTGFVNVFNFREYSNFETKLDFVRSLDSIRYDTEKRLFSISFDYDNFKTHNTTLAKTKWVIYLRGERIKKEHTSYGWKDDVWNVESRIKDLFDSSHMKYDDGHNLIEDILELESSVQKKLINELIEIIRLTVQLRNSKSERYDRTEAEYDRIVSPVMDEKGRFYDSENYIFNEETELPKDADANGAYCIALKGLYNVIAIKNNWKEGEKFNRKLLSLNNYNWFDFIQNRRF

SEQ ID NO: 976 - protein, 1245 aa, Ruminococcus sp.
MQEHKKISHLTHRNSVQKTIRMQLNPVGKTMDYFQAKQILENDEKLKEDYQKIKEIADRFYRNLNEDVLSKTGLDKLKDYAEIYYHCNTDADRKRLDECASELRKEIVKNFKNRDEYNKLFNKKMIEIVLPQHLKNEDEKEVVASFKNFTTYFTGFFTNRKNMYSDGEESTAIAYRCINENLPKHLDNVKAFEKAISKLSKNAVDDLDTTYSGLCGTNLYDVFTVDYFNFLLPQSGITEYNKIIGGYTTSDGTKVKGINEYINLYNQQVSKRYKIPNLKILYKQILSESEKVSFIPPKFEDDNELLSAVSEFYANDETFDGMPLKKAIDETKLLFGNLDNSSLNGIYIQNDRSVTNLSNSMFGSWSVIEDLWNKNYDSVNSNSRIKDIQKREDKRKKAYKAEKKLSLSFLQVLISNSENDEIREKSIVDYYKTSLMQLTDNLSDKYKEAAPLFNESYANEKGLKNDDKSISLIKNFLDAIKEIEKFIKPLSETNITGEKNDLFYSQFTPLLDNISRIDILYDKVRNYVTQKPFSTDKIKLNFGNSQLLNGWDRNKEKDCGAVWLCKDEKYYLAIIDKSNNSILENIDFQDCDESDCYEKIIYKLLPGPNKMLPKVFFSEKCKKLLSPSDEILKIRKNGTFKKGDKFSLDDCHKLIDFYKESFKKYPNWLIYNFKFKKTNEYNDISEFYNDVASQGYNISKMKIPTSFIDKLVDEGKIYLFQLYNKDFSPHSKGTPNLHTLYFKMLFDERNLEDVVYKLNGEAEMFYRPASIKYDKPTHPKNTPIKNKNTLNDKRASTFPYDLIKDKRYTKWQFSLHFPITMNFKAPDRAMINDDVRNLLKSCNNNFIIGIDRGERNLLYVSIIDSNGAIIYQHSLNIIGNKFKGKTYETNYREKLETREKERTEQRRNWKAIESIKELKEGYISQAVHVICQLVVKYDAIIVMEKLTDGFKRGRTKFEKQVYQKFEKMLIDKLNYYVDKKLDPDEEGGLLHAYQLTNKLESFDKLGMQSGFIFYVRPDFTSKIDPVTGFVNLLYPRYENIDKAKDMISRFDDIRYNAGEDFFEFDIDYDKFPKTASDYRKKWTICTNGERIEAFRNPASNNEWSYRTIILAEKFKELFDNNSINYRDSDNLKAEILSQTKGKFFEDFFKLLRLTLQMRNSNPETGEDRILSPVKDKNGNFYDSSKYDEKSNLPCDADANGAYNIARKGLWIVEQFKKSDNVSTVEPVIHNDKWLKFVQENDMANN

SEQ ID NO: 977 - protein, 1271 aa, Leptospira ryugenii
MKNLANFTNLYSLQKTLRFELKPIGKTLDWIIKKDLLKQDEILAEDYKIVKKIIDRYHKDFIDLAFESAYLQKKSSDSFTAIMEASIQSYSELYFIKEKSDRDKKAMEEISGIMRKEIVECFTGKYSEVVKKKFGNLFKKELIKEDLLNFCEPDELPIIQKFADFTTYFTGFHENRENMYSNEEKATAIANRLIRENLPRYLDNLRIIRSIQGRYKDFGWKDLESNLKRIDKNLQYSDFLTENGFVYTFSQKGIDRYNLILGGQSVESGEKIQGLNELINLYRQKNQLDRRQLPNLKELYKQILSDRTRHSFVPEKFSSDKALLRSLLDFHKEVIQNKNLFEEKQVSLLQAIRETLTDLKSFDLDRIYLTNDTSLTQISNFVFGDWSKVKTILAIYFDENIANPKDRQRQSNSYLKAKENWLKKNYYSIHELNEAISVYGKHSDEELPNTKIEDYFSGLQTKDETKKPIDVLDAIVSKYADLESLLTKEYPEDKNLKSDKGSIEKIKNYLDSIKLLQNFLKPLKPKKVQDEKDLGFYNDLELYLESLESANSLYNKVRNYLTGKEYSDEKIKLNFKNSTLLDGWDENKETSNLSVIFRDTNNYYLGILDKQNNRIFESIPEIQSGEETIQKMVYKLLPGANNMLPKVFFSEKGLLKFNPSDEITSLYSEGRFKKGDKFSINSLHTLIDFYKKSLAVHEDWSVFNFKFDETSHYEDISQFYRQVESQGYKITFKPISKKYIDTLVEDGKLYLFQIYNKDFSQNKKGGGKPNLHTIYFKSLFEKENLKDVIVKLNGQAEVFFRKKSIHYDENITRYGHHSELLKGRFSYPILKDKRFTEDKFQFHFPITLNFKSGEIKQFNARVNSYLKHNKDVKIIGIDRGERHLLYLSLIDQDGKILRQESLNLIKNDQNFKAINYQEKLHKKEIERDQARKSWGSIENIKELKEGYLSQVVHTISKLMVEHNAIVVLEDLNFGFKRGRQKVERQVYQKFEKMLIEKLNFLVFKDKEMDEPGGILKAYQLTDNFVSFEKMGKQTGFVFYVPAWNTSKIDPKTGFVNFLHLNYENVNQAKELIGKFDQIRYNQDRDWFEFQVTTDQFFTKENAPDTRTWIICSTPTKRFYSKRTVNGSVSTIEIDVNQKLKELFNDCNYQDGEDLVDRILEKDSKDFFSKLIAYLRILTSLRQNNGEQGFEERDFILSPVVGSDGKFFNSLDASSQEPKDADANGAYHIALKGLMNLHVINETDDESLGKPSWKISNKDWLNFVWQRPSLKA

SEQ ID NO: 978 - protein, 1245 aa, Ruminococcus sp.
MQEHKKISHLTHRNSVQKTIRMQLNPVGKTMDYFQAKQILENDEKLKENYQKIKEIADRFYRNLNEDVLSKTRLDKLKDYTDIYYHCNTDADRKRLDECASELRKEIVKNFKNRDEYNKLFNKKMIEIVLPKHLKNEDEKEVVTSFKNFTTYFTGFFTNRKNMYSDGEESTAIAYRCINENLPKHLDNVKAFEKAISKLSKNAIDDLDTTYSGLCGTNLYDVFTVDYFNFLLPQSGITEYNKIIGGYTTNDGTKVKGINEYINLYNQQVSKRDKIPNLKILYKQILSESEKVSFIPPKFEDDNELLSAVSEFYANDETFDGMPLKKAIDETKLLFGNLDNPSLNGIYIQNDRSVTNLSNSMFGSWSVIEDLWNKNYDSVNSNSRIKDIQKREDKRKKAYKAEKKLSLSFLQVLISNSENDEIREKSIVDYYKTSLMQLTDNLSDKYNEAAPLLNENYSNEKGLKNDDKSISLIKNFLDAIKEIEKFIKPLSETNITGEKNDLFYSQFTPLLDNISRIDILYDKVRNYVTQKPFSTDKIKLNFGNSQLLNGWDRNKEKDCGAVWLCKDEKYYLAIIDKSNNSILENIDFQDCDESDCYEKIIYKLLPGPNKMLPKVFFSEKCKKLLSPSDEILKIYKSGTFKTGDKFSLDDCHKLIDFYKESFKKYPNWLIYNFKFKKTNEYNDIREFYNDVALQGYNISKMKIPTSFIDKLVDEGKIYLFQLYNKDFSPHSKGTPNLHTLYFKMLFDERNLEDVVYRLNGEAEMFYRPASIKYDKPTHPKNTPIKNKNTLNDKKTSTFPYDLIKDKRYTKWQFSLHFPITMNFKAPDKAMINDDVRNLLKSCNNNFIIGIDRGERNLLYVSVIDSNGAIIYQHSLNIIGNKFKEKTYETNYREKLATREKERTEQRRNWKAIESIKELKEGYISQAVHVICQLVVKYDAIIVMEKLTDGFKRGRTKFEKQVYQKFEKMLIDKLNYYVDKKLDPDEEGGLLHAYQLTNKLESFDKLGMQSGFIFYVRPDFTSKIDPVTGFVNLLYPQYENIDKAKDMISRFDEIRYNAGEDFFEFDIDYDEFPKTASDYRKKWTICTNGERIEAFRNPANNNEWSYRTIILAEKFKELFDNNSINYRDSDDLKAEILSQTKGKFFEDFFKLLRLTLQMRNSNPETGEDRILSPVKDKNGNFYDSSKYDEKSKLPCDADANGAYNIARKGLWIVEQFKKADNVSTVEPVIHNDQWLKFVQENDMANN

SEQ ID NO: 979 - protein, 1245 aa, Ruminococcus bromii
MQEHKKISHLTHRNSVQKTIRMQLNPVGKTMDYFQAKQILENDEKLKEDYQKIKEIADRFYRNLNEDVLSKTGLDKLKDYADIYYHCNTDADRKRLNECASELRKEIVKNFKNRDEYNKLFNKKMIEIVLPKHLKNEDEKEVVASFKNFTTYFTGFFTNRKNMYSDGEESTAIAYRCINENLPKHLDNVKVFEKAISKLSKNAIDDLGATYSGLCGTNLYDVFTVDYFNFLLPQSGITEYNKIIGGYTTSDGTKVKGINEYINLYNQQVSKRDKIPNLKILYKQILSESEKVSFIPPKFEDDNELLSAVSEFYANDETFDGMPLKKAIDETKLLFGNLDNSSLNGIYIQNDRSVTNLSNSMFGSWSVIEDLWNKNYDSVNSNSRIKDIQKREDKRKKAYKAEKKLSLSFLQVLISNSENDEIREKSIVDYYKTSLMQLTDNLSDKYKEAAPLFSENYDNEKGLKNDDKSISLIKNFLDAIKEIEKFIKPLSETNITGEKNDLFYSQFTPLLDNISRIDILYDKVRNYVTQKPFSTDKIKLNFGNSQLLNGWDKDKEREYGAVLLCKDEKYYLAIIDKSNNSILENIDFQDCNESDYYEKIVYKLLTKINGNLPRVFFSEKRKKLLSPSDEILKIYKSGTFKKGDKFSLDDCHKLIDFYKESFKKYPNWLIYNFKFKNTNEYNDISEFYNDVASQGYNISKMKIPTTFIDKLVDEGKIYLFQLYNKDFSPHSKGTPNLHTLYFKMLFDERNLEDVVYKLNGEAEMFYRPASIKYDKPTHPKNTPIKNKNTLNDKKASTFPYDLIKDKRYTKWQFSLHFPITMNFKAPDKAMINDDVRNLLKSCNNNFIIGIDRGERNLLYVSVIDSNGAIIYQHSLNIIGNKFKGKTYETNYREKLATREKDRTEQRRNWKAIESIKELKEGYISQAVHVICQLVVKYDAIIVMEKLTDGFKRGRTKFEKQVYQKFEKMLIDKLNYYVDKKLDPDEEGGLLHAYQLTNKLESFDKLGTQSGFIFYVRPDFTSKIDPVTGFVNLLYPRYENIDKAKDMISRFDDIRYNAGEDFFEFDIDYDKFPKTASDYRKKWTICTNGERIEAFRNPANNNEWSYRTIILAEKFKELFDNNSINYRDSDDLKAEILSQTKGKFFEDFFKLLRLTLQMRNSNPETGEDRILSPVKDKNGNFYDSSKYDEKSKLPCDADANGAYNIARKGLWIVEQFKKADNVSTVEPVIHNDKWLKFVQENDMANN

SEQ ID NO: 980 - protein, 1244 aa, Ruminococcus bromii
MQERKKISHLTHRNSVKKTIRMQLNPVGKTMDYFQAKQILENDEKLKENYQKIKEIADRFYRNLNEDVLSKTGLDKLKDYAEIYYHCNTDADRKRLNKCASELRKEIVKNFKNRDEYNKLFDKRMIEIVLPKHLKNEDEKEVVASFKNFTTYFTGFFTNRKNMYSDGEESTAIAYRCINENLPKHLDNVKAFEKAISKLSKNAIDDLDAYSGLCGTNLYDVFTVDYFNFLLPQSGITEYNKIIGGYTTNDGTKVKGINEYINLYNQQVSKRDKIPNLQILYKQILSESEKVSFIPPKFEDDNELLSAVSEFYANDETFDGMPLKKAIDETKLLFGNLDNSSLNGIYIQNDRSVTNLSNSMFGSWSVIEDLWNKNYDSVNSNSRIKDIQKREDKRKKAYKAEKKLSLSFLQVLISNSENDEIRKKSIVDYYKTSLMQLTDNLSDKYNEAAPLLNENYSNEKGLKNDDKSISLIKNFLDAIKEIEKFIKPLSETNITGEKNDLFYSQFTPLLDNISRIDILYDKVRNYVTQKPFSTDKIKLNFGNYQLLNGWDKDKEREYGAVLLCKDEKYYLAIIDKSNNRILENIDFQDCDESDCYEKIIYKLLPTPNKMLPKVFFAKKHKKLLSPSDEILKIYKNGTFKKGDKFSLDDCHKLIDFYKESFKKYPKWLIYNFKFKKTNGYNDIREFYNDVALQGYNISKMKIPTSFIDKLVDEGKIYLFQLYNKDFSPHSKGTPNLHTLYFKMLFDERNLEDVVYRLNGEAEMFYRPASIKYDKPTHPKNTPIKNKNTLNDKRASTFPYDLIKDKRYTKWQFSLHFPITMNFKDPDKAMINDDVRNLLKSCNNNFIIGIDRGERNLLYVSVINSNGAIIYQHSLNIIGNKFKGKTYETNYREKLATREKDRTEQRRNWKAIESIKELKEGYISQAVHVICQLVVKYDAIIVMEKLTDGFKRGRTKFEKQVYQKFEKMLIDKLNYYVDKKLDPDEEGGLLHAYQLTNKLESFDKLGTQSGFIFYVRPDFTSKIDPVTGFVNLLYPRYEKIDKAKDMISRFDDIRYNAGEDFFEFDIDYDKFPKTASDYRKKWTICTNGERIEAFRNPANNNEWSYRTIILAEKFKELFDNNSINYRDSDDLKAEILSQTKGKFFEDFFKLLRLTLQMRNSNPETGEDRILSPVKDKNGNFYDSSKYDEKSKLPCDADANGAYNIARKGLWIVEQFKKADNVSTVEPVIHNDKWLKFVQENDMANN

SEQ ID NO: 981 - protein, 1175 aa, Ruminococcus sp.
KTGLDKLKDYAEIYYHCNTDADRKRLNKCASELRKEIVKNFKNRDEYNKLFDKRMIEIVLPKHLKNEDEKEVVASFKNFTTYFTGFFTNRKNMYSDGEESTAIAYRCINENLPKHLDNVKAFEKAISKLSKNAIDDLDATYSGLCGTNLYDVFTVDYFNFLLPQSGITEYNKIIGGYTTSDGTKVKGINEYINLYNQQVSKRDKIPNLQILYKQILSESEKVSFIPPKFEDDNELLSAVSEFYANDETFDEMPLKKAIDETKLLFGNLDNSSLNGIYIQNDRSVTNLSNSMFGSWSVIEDLWNKNYDSVNSNSRIKDIQKREDKRKKAYKAEKKLSLSFLQVLISNSENNEIREKSIVDYYKTSLMQLTDNLSDKYNEVAPLLNENYSNEKGLKNDDKSISLIKNFLDAIKEIEKFIKPLSETNITGEKNDLFYSQFTPLLDNISRIDILYDKVRNYVTQKPFSTDKIKLNFGNYQLLNGWDKDKEREYGAVLLCRDEKYYLAIIDKSNNRILENIDFQDCDESDCYEKIIYKLLPTPNKMLPKVFFAKKHKKLLSPSDEILKIRKNGTFKKGDKFSLDDCHKLIDFYKESFKKYPNWLIYNFKFKKTNEYNDIREFYNDVALQGYNISKMKIPTSFIDKLVDEGKIYLFQLYNKDFSPHSKGTPNLHTLYFKMLFDERNLEDVVYKLNGEAKMFYRPASIKYDKPTHPKNTPIKNKNTLNDKKASTFPYDLIKDKRYTKWQFSLHFSITMNFKAPDKAMINDDVRNLLKSCNNNFIIGIDRGERNLLYVSVIDSNGAIIYQHSLNIIGNKFKGKTYETNYREKLATREKERTEQRRNWKAIESIKELKEGYISQAVHVICQLVVKYDAIIVMEKLTDGFKRGRTKFEKQVYQKFEKMLIDKLNYYVDKKLDPDEEGGLLHAYQLTNKLESFDKLGTQSGFIFYVRPDFTSKIDPVTGFVNLLYPRYENIDKAKDMISRFDDIRYNAGEDFFEFDIDYDKFPKTASDYRKKWTICTNGERIEAFRNPANNNEWSYRTIILAEKFKELFDNNSINYRDSDDLKAEILSQTKGKFFEDFFKLLRLTLQMRNSNPETGEDRILSPVKDKNGNFYDSSKYDEKSKLPCDADANGAYNIARKGLWIVEQFKKSDNVSTVEPVIHNDKWLKFVQENDMANN

SEQ ID NO: 982 - protein, 1278 aa, Ruminococcus bovis
MSININKFSDECRKIDFFTDLYNIQKTLRFSLIPIGATADNFEFKGRLSKEKDLLDSAKRIKEYISKYLADESDICLSQPVKLKHLDEYYELYITKDRDEQKFKSVEEKLRKELADLLKEILKRLNKKILSDYLPEYLEDDEKALEDIANLSSFSTYFNSYYDNCKNMYTDKEQSTAIPYRCINDNLPKFIDNMKAYEKALEELKPSDLEELRNNFKGVYDTTVDDMFTLDYFNCVLSQSGIDSYNAIIGNDKVKGINEYINLHNQTAEQGHKVPNLKRLYKQIGSQKKTISFLPSKFESDNELLKAVYDFYNTGDAEKNFTALKDTITEFEKIFDNLSEYNLDGVFVRNDISLTNLSQSMFNDWSVFRNLWNDQYDKVNNPEKAKDIDKYNDKRHKVYKKSESFSINQLQELIATTLEEDINSKKITDYFSCDFHRVTTEVENKYQLVKDLLSSDYPKNKNLKTSEEDVALIKDFLDSVKSLESFVKILTGTGKESGKDELFYGSFTKWFDQLRYIDKLYDKVRNYITEKPYSLDKIKLSFDNPQFLGGWQHSKETDYSAQLFMKDGLYYLGVMDKETKREFKTQYNTPENDSDTMVKIEYNQIPNPGRVIQNLMLVDGKIVKKNGRKNADGVNAVLEELKNQYLPENINRIRKTESYKTTSNNFNKDDLKAYLEYYIARTKEYYCKYNFVFKSADEYGSFNEFVDDVNNQAYQITKVKVSEKQLLSLVEQGKLYLFKIYNKDFSEYSKGKKNLHTMYFQMLFDDRNLENLVYKLQGGAEMFYRPASIKKDSEFKHDANVEIIKRTCEDKVNDKDNPTDDEKAKYYSKFDYDIVKNKRFTKDQFSLHLTLAMNCNQPDHYWLNNDVRELLKKSNKNHIIGIDRGERNLIYVTIINSDGVIVDQINFNIIENSYNGKKYKTDYQKKLNQREEDRQKARKTWKTIETIKELKDGYISQVVHQICKLIVQYDAIVVMENLNGGFKRGRTKVEKQVYQKFETMLINKLNYYVDKGTDYKECGGLLKAYQLTNKFETFERIGKQSGIIFYVDPYLTSKIDPVTGFANLLYPKYETIPKTHNFISNIDDIRYNQSEDYFEFDIDYDKFPQGSYNYRKKWTICSYGNRIKYYKDSRNKTASVVVDITEKFKETFTNAGIDFVNDNIKEKLLLVNSKELLKSFMDTLKLTVQLRNSEINSDVDYIISPIKDRNGNFYYSENYKKSNNEVPSQPQDGDANGAYNIARKGLMIINKLKKADDVTNNELLKISKKEWLEFAQKGDLGE

SEQ ID NO: 983 - protein, 1562 aa, Leptospira ilyithenensis
MKATSIWDNFTRKYSVSKTLRFELRPVGKTEENIVKKEIIDAEWISGKNIPKGTDADRARDYKIVKKLLNQLHILFINQALSSENVKEFEKEDKKSKTFVAWSDLLATHFDNWIQYTRDKSNSTVLKSLEKSKKDLYSKLGKLLNSKANAWKAEFISYHKIKSPDNIKIRLSASNVQILFGNTSDPIQLLKYQIELDNIKFLKDDGSEYTTKELADLLSTFEKFGTYFSGFNQNRANVYDIDGEISTSIAYRLFNQNIEFFFQNIKRWEQFTSSIGHKEAKENLKLVQWDIQSKLKELDMEIVQPRFNLKFEKLLTPQSFIYLLNQEGIDAFNTVLGGIPAEVKAEKKQGVNELINLTRQKLNEDKRKFPSLQIMYKQIMSERKTNFIDQYEDDVEMLKEIQEFSNDWNEKKKRHSASSKEIKESAIAYIQREFHETFDSLEERATVKEDFYLSEKSIQNLSIDIFGGYNTIHNLWYTEVEGMLKSGERPLTRVEKEKLKKQEYISFAQIERLISKHSQQYLDSTPKEANDRSLFKEKWKKTFKNGFKVSEYTNLKLNELISEGETFQKIDQETGKETTIKIPGLFESYENAILVESIKNQSLGTNKKESVPSIKEYLDSCLRLSKFIESFLVNSKDLKEDQSLDGCSDFQNTLTQWLNEEFDVFILYNKVRNHVTKKPGNTDKIKINFDNATLLDGWDVDKEAANFGFLLKKADNYYLGIADSSFNQDLKYFNEGERLDEIEKNRKNLEKEESKNISKIDQEKVKKYKEVIDDLKAISNLNKGRYSKAFYKQSKFTTLIPKCTTQLNEVIEHFKKFDTDYRIENKKFAKPFIITKEVFLLNNTVYDTATKKFTLKIGEDEDTKGLKKFQIGYYRATDDKKGYESALRNWITFCIEFTKSYKSCLNYNYSSLKSVSEYKSLDEFYKDLNGIGYTIDFVDISEEYINKKINEGKLYLFQIYNKDFSEKSKGKENLHTTYWKLLFDSKNLEDVVIKLNGQAEVFFRPASIHEKEKITHFKNQEIQNKNPNAVKKTSKFEYDIIKDNRFTKNKFLFHCPITLNFKADGNPYVNNEVQENIAKNPNVNIIGIDRGEKHLLYFTVINQQGQILDAGSLNSIKSEYKDKNQQSVSFETPYHKILDKKESERKEARESWQEIENIKELKAGYLSHVVHQLSNLIVKYNAIVVLEDLNKGFKRGRFKVEKQVYQKFEKSLIEKLNYLVFKDRKESNEPGHHLNAYQLTNKFLSFERLGKQSGVLFYATASYTSKVDPVTGFMQNIYDPYHKEKTREFYKNFTKIVYNGNYFEFNYDLNSVKPDSEEKRYRTNWTVCSCVIRSEYDSNSKTQKTYNVNDQLVKLFEDAKIKIENGNDLKSTILEQDDKFIRDLHFYFIAIQKMRVVDSKIEKGEDSNDYIQSPVYPFYCSKEIQPNKKGFYELPSNGDSNGAYNIARKGIVILDKIRLRVQIEKLFEDGTKIDWQKLPNLISKVKDKKLLMTVFEEWAELTHQGEVQQGDLLGKKMSKKGEQFAEFIKGLNVTKEDWEIYTQNEKVVQKQIKTWKLFSNST

SEQ ID NO: 984 - protein, 1742 aa, Prevotella sp.
MKAINEYYKQLGAYCREEGKEKDDFFKRIDGAYCAISHLFFGEHGEIAQSDSDVELIQKLLEAYKGLQRFIKPLLGHGDEADKDNEFDAKLRKVWDELDIITPLYDKVRNWLSRKIYNPEKIKLCFENNGKLLSGWVDSRTKSDNGTQYGGYIFRKKNEIGEYDFYLGISADTKLFRRDAAISYDDGMYERLDYYQLKSKTLLGNSYVGDYGLDSMNLLSAFKNAAVKFQFEKEVVPKDKENVPKYLKRLKLDYAGFYQILMNDDKVVDAYKIMKQHILATLTSSIRVPAAIELATQKELGIDELIDEIMNLPSKSFGYFPIVTAAIEEANKRENKPLFLFKMSNKDLSYAATASKGLRKGRGTENLHSMYLKALLGMTQSVFDIGSGMVFFRHQTKGLAETTARHKANEFVANKNKLNDKKKSIFGYEIVKNKRFTVDKYLFKLSMNLNYSQPNNNKIDVNSKVREIISNGGIKNIIGIDRGERNLLYLSLIDLKGNIVMQKSLNILKDDHNAKETDYKGLLTEREGENKEARRNWKKIANIKDLKRGYLSQVVHIISKMMVEYNAIVVLEDLNPGFIRGRQKIERNVYEQFERMLIDKLNFYVDKHKGANETGGLLHALQLTSEFKNFKKSEHQNGCLFYIPAWNTSKIDPATGFVNLFNTKYTNAVEAQEFFSKFDEIRYNEEKDWFEFEFDYDKFTQKAHGTRTKWTLCTYGMRLRSFKNSAKQYNWDSEVVALTEEFKRILGEAGIDIHENLKDAICNLEGKSQKYLEPLMQFMKLLLQLRNSKAGTDEDYILSPVADENGIFYDSRSCGDQLPENADANGAYNIARKGLMLIEQIKNAEDLNNVKFDISNKAWLNFAQQKPYKNGMKAINEYYKQLGAYCREEGKEKDDFFKRIDGAYCAISHLFFGEHGEIAQSDSDVELIQKLLEAYKGLQRFIKPLLGHGDEADKDNEFDAKLRKVWDELDIITPLYDKVRNWLSRKIYNPEKIKLCFENNGKLLSGWVDSRTKSDNGTQYGGYIFRKKNEIGEYDFYLGISADTKLFRRDAAISYDDGMYERLDYYQLKSKTLLGNSYVGDYGLDSMNLLSAFKNAAVKFQFEKEVVPKDKENVPKYLKRLKLDYAGFYQILMNDDKVVDAYKIMKQHILATLTSSIRVPAAIELATQKELGIDELIDEIMNLPSKSFGYFPIVTAAIEEANKRENKPLFLFKMSNKDLSYAATASKGLRKGRGTENLHSMYLKALLGMTQSVFDIGSGMVFFRHQTKGLAETTARHKANEFVANKNKLNDKKKSIFGYEIVKNKRFTVDKYLFKLSMNLNYSQPNNNKIDVNSKVREIISNGGIKNIIGIDRGERNLLYLSLIDLKGNIVMQKSLNILKDDHNAKETDYKGLLTEREGENKEARRNWKKIANIKDLKRGYLSQVVHIISKMMVEYNAIVVLEDLNPGFIRGRQKIERNVYEQFERMLIDKLNFYVDKHKGANETGGLLHALQLTSEFKNFKKSEHQNGCLFYIPAWNTSKIDPATGFVNLFNTKYTNAVEAQEFFSKFDEIRYNEEKDWFEFEFDYDKFTQKAHGTRTKWTLCTYGMRLRSFKNSAKQYNWDSEVVALTEEFKRILGEAGIDIHENLKDAICNLEGKSQKYLEPLMQFMKLLLQLRNSKAGTDEDYILSPVADENGIFYDSRSCGDQLPENADANGAYNIARKGLMLIEQIKNAEDLNNVKFDISNKAWLNFAQQKPYKNG

SEQ ID NO: 985 - RNA, 19 nt, Artificial Sequence
  Description of Artificial Sequence: Synthetic oligonucleotide
uaauuucuacucuuguaga

SEQ ID NO: 986 - protein, 1372 aa, Artificial Sequence
  Description of Artificial Sequence: Synthetic polypeptide
MGHHHHHHSSGLVPRGSGTMKEFTNQYSLTKTLRFELRPVGETAEKIEDFKSGGLKQTVEKDRERTEAYKQLKEVIDSYHRDFIEQAFARQQTLSEEDFKQTYQLYKEAQKEKDGETLTKQYEHLRKKIAAMFSKATKEWAVMGENNELIGKNKESKLYQWLEKNYRAGRIEKEEFDHNAGLIEYFEKFSTYFVGFDKNRANMYSKEAKATAISFRTINENMVKHFDNCQRLEKIKSKYPDLAEELKDFEEFFKPSYFINCMNQSGIDYYNISAIGGKDEKDQKANMKINLFTQKNHLKGSDKPPFFAKLYKQILSDREKSVVIDEFEKDSELTEALKNVFSKDGLINEEFFTKLKSALENFMLPEYQGQLYIRNAFLTKISANIWGSGSWGIIKDAVTQAAENNFTRKSDKEKYAKKDFYSIAELQQAIDEYIPTLENGVQNASLIEYFRKMNYKPRGSEEDAGLIEEINNNLRQAGIVLNQAELGSGKQREENIEKIKNLLDSVLNLERFLKPLYLEKEKMRPKAANLNKDFCESFDPLYEKLKTFFKLYNKVRNYATKKPYSKDKFKINFDTATLLYGWSLDKETANLSVIFRKREKFYLGIINRYNSQIFNYKIAGSESEKGLERKRSLQQKVLAEEGEDYFEKMVYHLLLGASKTIPKCSTQLKEVKAHFQKSSEDYIIQSKSFAKSLTLTKEIFDLNNLRYNTETGEISSELSDTYPKKFQKGYLTQTGDVSGYKTALHKWIDFCKEFLRCYRNTEIFTFHFKDTKEYESLDEFLKEVDSSGYEISFDKIKASYINEKVNAGELYLFEIYNKDFSEYSKGKPNLHTIYWKSLFETQNLLDKTAKLNGKAEIFFRPRSIKHNDKIIHRAGETLKNKNPLNEKPSSRFDYDITKDRRFTKDKFFLHCPITLNFKQDKPVRFNEQVNLYLKDNPDVNIIGIDRGERHLLYYTLINQNGEILQQGSLNRIGEEESRPTDYHRLLDEREKQRQQARETWKAVEGIKDLKAGYLSRVVHKLAGLMVQNNAIVVLEDLNKGFKRGRFAVEKQVYQNFEKALIQKLNYLVFKEVNSKDAPGHYLKAYQLTAPFISFEKLGTQSGFLFYVRAWNTSKIDPATGFTDQIKPKYKNQKQAKDFMSSFDSVRYNRKENYFEFEADFEKLAQKPKGRTRWTICSYGQERYSYSPKERKFVKHNVTQNLAELFNSEGISFDSGQCFKDEILKVEDASFFKSIIFNLRLLLKLRHTCKNAEIERDFIISPVKGNNSSFFDSRIAEQENITSIPQNADANGAYNIALKGLMNLHNISKDGKAKLIKDEDWIEFVQKRKFAAAKRPAATKKAGQAKKKKASGSGAGSPKKKRKVEDPKKKRKV

SEQ ID NO: 987 - RNA, 15 nt, Artificial Sequence
  Description of Artificial Sequence: Synthetic oligonucleotide
aucuacaacaguaga

SEQ ID NO: 988 - DNA, 4122 bp, Artificial Sequence
  Description of Artificial Sequence: Synthetic polynucleotide
atgggccaccatcatcatcatcatagcagcggcctggtgccgcgcggcagcggtaccatgaaggagtttaccaaccaatattccttaaccaagaccctgcggttcgagttgcggccagtcggcgaaacagcagaaaagatcgaagattttaaatcgggcgggctcaagcaaacagtggaaaaggatcgtgagcgtacagaagcgtataagcagttgaaagaggttattgactcctatcatcgtgacttcattgagcaagcttttgcgcgccagcagacgctgtccgaggaggattttaaacaaacatatcaactgtacaaagaggcccagaaagagaaggatggggaaacattaacaaagcagtacgagcatttacggaagaaaatcgcagctatgttcagcaaggctacgaaggaatgggccgttatgggggagaataacgaattgatcgggaaaaacaaagagtcaaagttgtatcagtggctggagaagaactaccgcgcaggtcgcatcgaaaaagaggaattcgaccataatgcgggcttaatcgaatacttcgagaaattttccacatatttcgtaggttttgacaaaaatcgtgcgaatatgtattcaaaggaggcaaaggcgaccgcaatttccttccggacgattaatgagaacatggtcaagcatttcgataattgccagcggctcgagaagattaaatctaaatatcctgatttggccgaggagctgaaggattttgaggagttttttaaacctagctatttcattaattgtatgaatcaatcgggtatcgactactacaatatcagcgcgatcggcggtaaggatgaaaaggatcagaaagcgaatatgaagatcaaccttttcacgcaaaaaaatcatttaaagggcagtgataaaccaccattttttgctaagctctacaagcaaattttgagtgaccgggagaagtccgtggtaatcgacgagttcgaaaaggacagcgaattgacagaggcactcaaaaacgtgttttccaaggacggtttgatcaatgaggagttttttacaaagttaaaaagtgcattagaaaattttatgttgcctgaatatcaaggtcaactctacatccgtaacgctttccttacgaagatcagcgcaaacatttggggctctggttcttggggcatcatcaaggacgcagttacccaggctgcggaaaacaatttcacgcgtaagtctgacaaggaaaagtatgccaagaaagacttctattccattgctgaactccagcaggctattgatgaatacattcctactctggagaacggggttcaaaacgcatcactcatcgagtactttcgcaaaatgaattacaaaccacgcggttctgaagaagacgcaggcttgatcgaagaaattaataacaacctgcgtcaggctgggatcgtcctgaatcaagccgagctggggtctggtaagcagcgggaagagaatattgaaaaaattaagaacttattagattcggttttgaatctcgaacgtttcttaaagccactttacttggagaaagagaaaatgcgtccaaaagctgctaacctgaataaggatttttgtgagtcatttgatccactttacgagaaactgaaaacgtttttcaagctctacaataaagtacgtaactacgcaacaaagaaaccatactcaaaggacaaatttaagatcaattttgataccgctacgttattatatgggtggagtttggataaggaaaccgcgaatctcagcgtcattttccgtaaacgcgaaaaattctatttgggtatcatcaaccggtacaatagccagattttcaattataagattgcgggcagtgagagcgagaaagggttagagcgtaagcggtcgctgcagcaaaaggtgcttgcagaggagggtgaagattattttgagaaaatggtataccacctgctgcttggcgcgtcgaaaactattccgaaatgctcgacacagttgaaagaagtaaaagcacactttcaaaagtcatcagaagattatattatccaatccaaatcatttgcaaagtcattaacattaacaaaagagatctttgacttaaataatctgcggtataacacagaaacgggcgaaattagttccgagctttctgatacatatccgaagaagttccagaaggggtatctcacacaaacaggcgacgtttcgggttacaaaactgctctgcataagtggattgatttctgcaaagagttcttgcgttgctatcgtaatacggagatcttcacgttccatttcaaggacacgaaggagtacgagtcgttagatgagttcttgaaagaagtggatagttcaggttatgagatttcattcgataagatcaaagcctcttatatcaacgagaaggttaatgcaggcgagctgtacttgttcgagatctataataaagatttctccgagtattccaaaggtaagccaaatctgcataccatttattggaaaagtctcttcgagactcaaaacttgctggataaaacagcgaaactcaacggcaaggcagagatcttcttccggccacgttcgatcaaacacaacgacaaaatcatccaccgtgcgggcgaaacacttaagaataaaaacccgctcaatgaaaagcctagttcgcgtttcgattacgatattacgaaagatcgtcgttttacgaaagacaaattttttttacactgccctattacgttaaactttaagcaggacaagcctgttcgctttaatgaacaagtcaacttatacttaaaagacaatccagacgtgaatattatcggtatcgatcgtggtgagcgtcacttgctttattacactttgatcaatcagaatggtgagatcttacagcagggttcacttaatcgcattggtgaggaagaatctcggcctacggactaccatcggttactcgatgagcgtgaaaagcagcgtcaacaagcacgggagacgtggaaagcagtagaagggattaaggacttaaaagctgggtatctttcacgggttgtacataaacttgcaggtttaatggtacaaaacaacgcaattgtcgttctggaagatcttaacaagggttttaagcgcggtcgtttcgctgttgagaaacaggtgtaccagaacttcgaaaaagcacttattcaaaagcttaactatttagtgttcaaggaggtcaactctaaagacgcccctggccactatttgaaggcatatcagcttacggcccctttcatctcgttcgaaaaattgggtactcagagcggtttccttttttatgtgcgcgcatggaatacctcgaagatcgacccggcgacgggttttaccgaccaaatcaaaccaaagtataaaaaccaaaaacaagctaaagacttcatgtcaagcttcgactctgtccggtacaaccgcaaggaaaattattttgaattcgaggcggactttgaaaaactggcacagaaacctaaggggcgcacccgctggacgatttgttcctatggccaggaacggtactcttactccccaaaagaacggaagtttgtaaagcacaacgttacacaaaatcttgctgagctttttaattcagagggtatctcgttcgactccgggcagtgtttcaaggatgagatcctgaaggtcgaggatgccagtttctttaagtctattattttcaatcttcgcctccttctcaagcttcgtcacacttgcaagaacgccgagatcgaacgtgatttcatcatttctcctgtcaaggggaacaattcgtccttttttgactcccgtattgccgaacaagaaaatatcaccagcattccacagaatgctgatgcaaacggtgcatacaacatcgcgctgaagggcctgatgaacctccataatatctctaaggacggcaaggcaaaattaattaaggatgaagattggatcgaatttgtccaaaaacgcaagttcgcggccgcaaaaaggccggcggccacgaaaaaggccggccaggcaaaaaagaaaaaggctagcggcagcggcgccggatccccaaagaagaaaaggaaggttgaagaccccaagaaaaagaggaaggtgtgataa

SEQ ID NO: 989 - RNA, 15 nt, Artificial Sequence
  Description of Artificial Sequence: Synthetic oligonucleotide
aucuacaaaaguaga

SEQ ID NO: 990 - RNA, 10 nt, Artificial Sequence
  Description of Artificial Sequence: Synthetic oligonucleotide
uaauucccac

SEQ ID NO: 991 - RNA, 12 nt, Artificial Sequence
  Description of Artificial Sequence: Synthetic oligonucleotide
uaauuuucuacu

SEQ ID NO: 992 - protein, 8 aa, Artificial Sequence
  Description of Artificial Sequence: Synthetic peptide
PPKKARED

SEQ ID NO: 993 - protein, 8 aa, Artificial Sequence
  Description of Artificial Sequence: Synthetic peptide
PQPKKKPL

SEQ ID NO: 994 - protein, 6 aa, Artificial Sequence
  Description of Artificial Sequence: Synthetic peptide
HHHHHH

SEQ ID NO: 995 - DNA, 21 bp, Artificial Sequence
  Description of Artificial Sequence: Synthetic oligonucleotide
agtgggggtgaattcagtgta

SEQ ID NO: 996 - DNA, 21 bp, Artificial Sequence
  Description of Artificial Sequence: Synthetic oligonucleotide
caaggacttcagctgggggaa

SEQ ID NO: 997 - DNA, 21 bp, Artificial Sequence
  Description of Artificial Sequence: Synthetic oligonucleotide
gagtctctcagctggtacacg

SEQ ID NO: 998 - DNA, 6470 bp, Artificial Sequence
  Description of Artificial Sequence: Synthetic polynucleotide
cgcgtattgggatcctcagcgttccaaatagggacttctgtgggtttttctttacatccatcttacccttcccaagtccccatgtccctgcgtaaaccctaaagccacctctcaaaaggttctctagttcccttcaaggttctctagttcccttcattccacatatctcctcttccacaccctctagccagtagagctcccttctgacaagcaagtctaagatctagatgacagatgacttcctgcatttgggtggttcttttgtcactaatttgccttttctaaaattgtcctggtttcttctgccaatttcccttctttctccccagcatataaagtctccatctctggaaccacagtaatattgacatgccctcagtatcctggatctgaaatactatggcaacacaatgataaaaacataggcggtgatgaggatgataaaaacataggcagtgatgaggatcacctgtcactgaaggaattttcagaattggagcaaagtggttattatgtctgccgtgaggctccggtgcccgtcagtgggcagagcgcacatcgcccacagtccccgagaagttggggggaggggtcggcaattgaaccggtgcctagagaaggtggcgcggggtaaactgggaaagtgatgtcgtgtactggctccgcctttttcccgagggtgggggagaaccgtatataagtgcagtagtcgccgtgaacgttctttttcgcaacgggtttgccgccagaacacaggtaagtgccgtgtgtggttcccgcgggcctggcctctttacgggttatggcccttgcgtgccttgaattacttccacctggctgcagtacgtgattcttgatcccgagcttcgggttggaagtgggtgggagagttcgaggccttgcgcttaaggagccccttcgcctcgtgcttgagttgaggcctggcctgggcgctggggccgccgcgtgcgaatctggtggcaccttcgcgcctgtctcgctgctttcgataagtctctagccatttaaaatttttgatgacctgctgcgacgctttttttctggcaagatagtcttgtaaatgcgggccaagatctgcacactggtatttcggtttttggggccgcgggcggcgacggggcccgtgcgtcccagcgcacatgttcggcgaggcggggcctgcgagcgcggccaccgagaatcggacgggggtagtctcaagctggccggcctgctctggtgcctggcctcgcgccgccgtgtatcgccccgccctgggcggcaaggctggcccggtcggcaccagttgcgtgagcggaaagatggccgcttcccggccctgctgcagggagctcaaaatggaggacgcggcgctcgggagagcgggcgggtgagtcacccacacaaaggaaaagggcctttccgtcctcagccgtcgcttcatgtgactccactgagtaccgggcgccgtccaggcacctcgattagttctcgtgcttttggagtacgtcgtctttaggttggggggaggggttttatgcgatggagtttccccacactgagtgggtggagactgaagttaggccagcttggcacttgatgtaattctccttggaatttgccctttttgagtttggatcttggttcattctcaagcctcagacagtggttcaaagtttttttcttccatttcaggtgtcgtgagctagagccaccatggagtttgggctgagctggctttttcttgtggctattttaaaaggtgtccagtgcggatccgagctgcggatcgagacaaagggccagtacgacgaggaagagatgacaatgcagcaggccaagcggcggcagaaacgcgagtgggtcaagttcgccaagccctgcagagagggcgaggacaacagcaagcggaaccctatcgccaagatcaccagcgactaccaggccacccagaagatcacctaccggatcagcggcgtgggcatcgaccagccccctttcggcatcttcgtggtggacaagaacaccggcgacatcaacatcaccgccatcgtggacagagaggaaacccccagcttcctgatcacctgtcgggccctgaatgcccagggcctggacgtggaaaagcccctgatcctgaccgtgaagatcctggacatcaacgacaacccccccgtgttcagccagcagatcttcatgggcgagatcgaggaaaacagcgccagcaacagcctcgtgatgatcctgaacgccaccgacgccgacgagcccaaccacctgaatagcaagatcgccttcaagatcgtgtcccaggaacccgccggaacccccatgttcctgctgagcagaaataccggcgaagtgcggaccctgaccaacagcctggatagagagcaggccagcagctaccggctggtggtgtctggcgctgacaaggatggcgagggcctgagcacacagtgcgagtgcaacatcaaagtgaaggacgtgaacgacaacttccctatgttccgggacagccagtacagcgcccggatcgaagagaacatcctgagcagcgagctgctgcggttccaagtgaccgacctggacgaagagtacaccgacaactggctggccgtgtacttcttcaccagcggcaacgagggcaattggttcgagatccagaccgacccccggaccaatgagggcatcctgaaggtcgtgaaggccctggactacgagcagctgcagagcgtgaagctgtctatcgccgtgaagaacaaggccgagttccaccagtccgtgatcagccggtacagagtgcagagcacccccgtgaccatccaagtgatcaacgtgcgcgagggcattgccttcgctagcggtggcggaggttctggaggtggaggttcctccggaatctacatctgggcgcccttggccgggacttgtggggtccttctcctgtcactggttatcaccctttactgcaaacggggcagaaagaaactcctgtatatattcaaacaaccatttatgagaccagtacaaactactcaagaggaagatggctgtagctgccgatttccagaagaagaagaaggaggatgtgaactgagagtgaagttcagcaggagcgcagacgcccccgcgtaccagcagggccagaaccagctctataacgagctcaatctaggacgaagagaggagtacgatgttttggacaagagacgtggccgggaccctgagatggggggaaagccgagaaggaagaaccctcaggaaggcctgtacaatgaactgcagaaagataagatggcggaggcctacagtgagattgggatgaaaggcgagcgccggaggggcaaggggcacgatggcctttaccagggtctcagtacagccaccaaggacacctacgacgcccttcacatgcaggccctgccccctcgctaagtcgacaatcaacctctggattacaaaatttgtgaaagattgactggtattcttaactatgttgctccttttacgctatgtggatacgctgctttaatgcctttgtatcatgctattgcttcccgtatggctttcattttctcctccttgtataaatcctggttgctgtctctttatgaggagttgtggcccgttgtcaggcaacgtggcgtggtgtgcactgtgtttgctgacgcaacccccactggttggggcattgccaccacctgtcagctcctttccgggactttcgctttccccctccctattgccacggcggaactcatcgccgcctgccttgcccgctgctggacaggggctcggctgttgggcactgacaattccgtggtgttgtcggggaagctgacgtcctttccttggctgctcgcctgtgttgccacctggattctgcgcgggacgtccttctgctacgtcccttcggccctcaatccagcggaccttccttcccgcggcctgctgccggctctgcggcctcttccgcgtcttcgccttcgccctcagacgagtcggatctccctttgggccgcctccccgcctgcgactgtgccttctagttgccagccatctgttgtttgcccctcccccgtgccttccttgaccctggaaggtgccactcccactgtcctttcctaataaaatgaggaaattgcatcgcattgtctgagtaggtgtcattctattctggggggtggggtggggcaggacagcaagggggaggattgggaagacaatagcaggcatgctggggatgcggtgggctctatggtaccccagaggaagcaaaccagaagatgcgaacttttatctctacctgagggcaagaggtaatccaggtctccagaacaggtaccaccggctctttagggaggaccattcaaaagggcattctcagtgattttccctaacccagctcacagtgcccaggcgtctttgcgcttcctcccacactcaatcctgggactctctggtaccacacggcatcagtgttttctggaatatagattaaacaccaatatgaggcttctgggtaaccccagtctgtgcgagatctaaaatagcaactccctaagagacaggactgggtcatttgcaccgcatcacacccaggttcatagcacaccaacatgagtttatctaatgcttcctccagagataaatttttcagaaaggtttgcaaaaaacactcaaggccactatagtaaaatggcataagctaaggtataataataaaataataacaatacttaacatttattgagtgcttatgcggccgctgtctgctaccccagaggaagcaaacaggtcgactctagaggatcccgggtaccgagctcgaattcggatatcctcgagactagtgggcccgtttaaacacatgtgtttttccataggctccgcccccctgacgagcatcacaaaaatcgacgctcaagtcagaggtggcgaaacccgacaggactataaagataccaggcgtttccccctggaagctccctcgtgcgctctcctgttccgaccctgccgcttaccggatacctgtccgcctttctcccttcgggaagcgtggcgctttctcatagctcacgctgtaggtatctcagttcggtgtaggtcgttcgctccaagctgggctgtgtgcacgaaccccccgttcagcccgaccgctgcgccttatccggtaactatcgtcttgagtccaacccggtaagacacgacttatcgccactggcagcagccactggtaacaggattagcagagcgaggtatgtaggcggtgctacagagttcttgaagtggtggcctaactacggctacactagaagaacagtatttggtatctgcgctctgctgaagccagttaccttcggaaaaagagttggtagctcttgatccggcaaacaaaccaccgctggtagcggtggtttttttgtttgcaagcagcagattacgcgcagaaaaaaaggatctcaagaagatcctttgatcttttctactaccaatgcttaatcagtgaggcacctatctcagcgatctgtctatttcgttcatccatagttgcctgactccccgtcgtgtagataactacgatacgggagggcttaccatctggccccagtgctgcaatgataccgcgagacccacgctcaccggctccagatttatcagcaataaaccagccagccggaagggccgagcgcagaagtggtcctgcaactttatccgcctccatccagtctattaattgttgccgggaagctagagtaagtagttcgccagttaatagtttgcgcaacgttgttgccattgctacaggcatcgtggtgtcacgctcgtcgtttggtatggcttcattcagctccggttcccaacgatcaaggcgagttacatgatcccccatgttgtgcaaaaaagcggttagctccttcggtcctccgatcgttgtcagaagtaagttggccgcagtgttatcactcatggttatggcagcactgcataattctcttactgtcatgccatccgtaagatgcttttctgtgactggtgagtactcaaccaagtcattctgagaatagtgtatgcggcgaccgagttgctcttgcccggcgtcaatacgggataataccgcgccacatagcagaactttaaaagtgctcatcattggaaaacgttcttcggggcgaaaactctcaaggatcttaccgctgttgagatccagttcgatgtaacccactcgtgcacccaactgatcttcagcatcttttactttcaccagcgtttctgggtgagcaaaaacaggaaggcaaaatgccgcaaaaaagggaataagggcgacacggaaatgttgaatactcatactcttcctttttcaatattattgaagcatttatcagggttattgtctcatgagcggatacatacgcgaggccatatgggttaactttgcttcctctggggtagcagacacctcagca

SEQ ID NO: 999 - DNA, 6470 bp, Artificial Sequence
  Description of Artificial Sequence: Synthetic polynucleotide
cgcgtattgggatcctcagcaaaggaaaattataattagaaaaagtcaatttagttattgtaattataccactaatgagagtttcctacctcgagtttcaggattacatagccatgcaccaagcaaggctttgaaaaataaagatacacagataaattatttggatagatgatcagacaagcctcagtaaaaacagccaagacaatcaggatataatgtgaccataggaagctggggagacagtaggcaatgtgcatccatgggacagcatagaaaggaggggcaaagtggagagagagcaacagacactgggatggtgaccccaaaacaatgagggcctagaatgacatagttgtgcttcattacggcccattcccagggctctctctcacacacacagagcccctaccagaaccagacagctctcagagcaaccctggctccaacccctcttccctttccagaggacctgaacaaggtgttcccacccgaggtcgctgtgtttgagccatcagaagcacgtgaggctccggtgcccgtcagtgggcagagcgcacatcgcccacagtccccgagaagttggggggaggggtcggcaattgaaccggtgcctagagaaggtggcgcggggtaaactgggaaagtgatgtcgtgtactggctccgcctttttcccgagggtgggggagaaccgtatataagtgcagtagtcgccgtgaacgttctttttcgcaacgggtttgccgccagaacacaggtaagtgccgtgtgtggttcccgcgggcctggcctctttacgggttatggcccttgcgtgccttgaattacttccacctggctgcagtacgtgattcttgatcccgagcttcgggttggaagtgggtgggagagttcgaggccttgcgcttaaggagccccttcgcctcgtgcttgagttgaggcctggcctgggcgctggggccgccgcgtgcgaatctggtggcaccttcgcgcctgtctcgctgctttcgataagtctctagccatttaaaatttttgatgacctgctgcgacgctttttttctggcaagatagtcttgtaaatgcgggccaagatctgcacactggtatttcggtttttggggccgcgggcggcgacggggcccgtgcgtcccagcgcacatgttcggcgaggcggggcctgcgagcgcggccaccgagaatcggacgggggtagtctcaagctggccggcctgctctggtgcctggcctcgcgccgccgtgtatcgccccgccctgggcggcaaggctggcccggtcggcaccagttgcgtgagcggaaagatggccgcttcccggccctgctgcagggagctcaaaatggaggacgcggcgctcgggagagcgggcgggtgagtcacccacacaaaggaaaagggcctttccgtcctcagccgtcgcttcatgtgactccactgagtaccgggcgccgtccaggcacctcgattagttctcgtgcttttggagtacgtcgtctttaggttggggggaggggttttatgcgatggagtttccccacactgagtgggtggagactgaagttaggccagcttggcacttgatgtaattctccttggaatttgccctttttgagtttggatcttggttcattctcaagcctcagacagtggttcaaagtttttttcttccatttcaggtgtcgtgagctagagccaccatggagtttgggctgagctggctttttcttgtggctattttaaaaggtgtccagtgcggatccgagctgcggatcgagacaaagggccagtacgacgaggaagagatgacaatgcagcaggccaagcggcggcagaaacgcgagtgggtcaagttcgccaagccctgcagagagggcgaggacaacagcaagcggaaccctatcgccaagatcaccagcgactaccaggccacccagaagatcacctaccggatcagcggcgtgggcatcgaccagccccctttcggcatcttcgtggtggacaagaacaccggcgacatcaacatcaccgccatcgtggacagagaggaaacccccagcttcctgatcacctgtcgggccctgaatgcccagggcctggacgtggaaaagcccctgatcctgaccgtgaagatcctggacatcaacgacaacccccccgtgttcagccagcagatcttcatgggcgagatcgaggaaaacagcgccagcaacagcctcgtgatgatcctgaacgccaccgacgccgacgagcccaaccacctgaatagcaagatcgccttcaagatcgtgtcccaggaacccgccggaacccccatgttcctgctgagcagaaataccggcgaagtgcggaccctgaccaacagcctggatagagagcaggccagcagctaccggctggtggtgtctggcgctgacaaggatggcgagggcctgagcacacagtgcgagtgcaacatcaaagtgaaggacgtgaacgacaacttccctatgttccgggacagccagtacagcgcccggatcgaagagaacatcctgagcagcgagctgctgcggttccaagtgaccgacctggacgaagagtacaccgacaactggctggccgtgtacttcttcaccagcggcaacgagggcaattggttcgagatccagaccgacccccggaccaatgagggcatcctgaaggtcgtgaaggccctggactacgagcagctgcagagcgtgaagctgtctatcgccgtgaagaacaaggccgagttccaccagtccgtgatcagccggtacagagtgcagagcacccccgtgaccatccaagtgatcaacgtgcgcgagggcattgccttcgctagcggtggcggaggttctggaggtggaggttcctccggaatctacatctgggcgcccttggccgggacttgtggggtccttctcctgtcactggttatcaccctttactgcaaacggggcagaaagaaactcctgtatatattcaaacaaccatttatgagaccagtacaaactactcaagaggaagatggctgtagctgccgatttccagaagaagaagaaggaggatgtgaactgagagtgaagttcagcaggagcgcagacgcccccgcgtaccagcagggccagaaccagctctataacgagctcaatctaggacgaagagaggagtacgatgttttggacaagagacgtggccgggaccctgagatggggggaaagccgagaaggaagaaccctcaggaaggcctgtacaatgaactgcagaaagataagatggcggaggcctacagtgagattgggatgaaaggcgagcgccggaggggcaaggggcacgatggcctttaccagggtctcagtacagccaccaaggacacctacgacgcccttcacatgcaggccctgccccctcgctaagtcgacaatcaacctctggattacaaaatttgtgaaagattgactggtattcttaactatgttgctccttttacgctatgtggatacgctgctttaatgcctttgtatcatgctattgcttcccgtatggctttcattttctcctccttgtataaatcctggttgctgtctctttatgaggagttgtggcccgttgtcaggcaacgtggcgtggtgtgcactgtgtttgctgacgcaacccccactggttggggcattgccaccacctgtcagctcctttccgggactttcgctttccccctccctattgccacggcggaactcatcgccgcctgccttgcccgctgctggacaggggctcggctgttgggcactgacaattccgtggtgttgtcggggaagctgacgtcctttccttggctgctcgcctgtgttgccacctggattctgcgcgggacgtccttctgctacgtcccttcggccctcaatccagcggaccttccttcccgcggcctgctgccggctctgcggcctcttccgcgtcttcgccttcgccctcagacgagtcggatctccctttgggccgcctccccgcctgcgactgtgccttctagttgccagccatctgttgtttgcccctcccccgtgccttccttgaccctggaaggtgccactcccactgtcctttcctaataaaatgaggaaattgcatcgcattgtctgagtaggtgtcattctattctggggggtggggtggggcaggacagcaagggggaggattgggaagacaatagcaggcatgctggggatgcggtgggctctatgggagatctcccacacccaaaaggccacactggtgtgcctggccacaggcttcttccctgaccacgtggagctgagctggtgggtgaatgggaaggaggtgcacagtggggtcagcacggacccgcagcccctcaaggagcagcccgccctcaatgactccagatactgcctgagcagccgcctgagggtctcggccaccttctggcagaacccccgcaaccacttccgctgtcaagtccagttctacgggctctcggagaatgacgagtggacccaggatagggccaaacccgtcacccagatcgtcagcgccgaggcctggggtagagcaggtgagtggggcctggggagatgcctggaggagattaggtgagaccagctaccagggaaaatggaaagatccaggtagcagacaagactagatccaaaaagaaaggaaccagcgcacaccatgaaggagaattgggcacctgtggttcattcttctcccagattctcagcgcggccgcagatctctgcttctgatggctcaaacaggtcgactctagaggatcccgggtaccgagctcgaattcggatatcctcgagactagtgggcccgtttaaacacatgtgtttttccataggctccgcccccctgacgagcatcacaaaaatcgacgctcaagtcagaggtggcgaaacccgacaggactataaagataccaggcgtttccccctggaagctccctcgtgcgctctcctgttccgaccctgccgcttaccggatacctgtccgcctttctcccttcgggaagcgtggcgctttctcatagctcacgctgtaggtatctcagttcggtgtaggtcgttcgctccaagctgggctgtgtgcacgaaccccccgttcagcccgaccgctgcgccttatccggtaactatcgtcttgagtccaacccggtaagacacgacttatcgccactggcagcagccactggtaacaggattagcagagcgaggtatgtaggcggtgctacagagttcttgaagtggtggcctaactacggctacactagaagaacagtatttggtatctgcgctctgctgaagccagttaccttcggaaaaagagttggtagctcttgatccggcaaacaaaccaccgctggtagcggtggtttttttgtttgcaagcagcagattacgcgcagaaaaaaaggatctcaagaagatcctttgatcttttctactaccaatgcttaatcagtgaggcacctatctcagcgatctgtctatttcgttcatccatagttgcctgactccccgtcgtgtagataactacgatacgggagggcttaccatctggccccagtgctgcaatgataccgcgagacccacgctcaccggctccagatttatcagcaataaaccagccagccggaagggccgagcgcagaagtggtcctgcaactttatccgcctccatccagtctattaattgttgccgggaagctagagtaagtagttcgccagttaatagtttgcgcaacgttgttgccattgctacaggcatcgtggtgtcacgctcgtcgtttggtatggcttcattcagctccggttcccaacgatcaaggcgagttacatgatcccccatgttgtgcaaaaaagcggttagctccttcggtcctccgatcgttgtcagaagtaagttggccgcagtgttatcactcatggttatggcagcactgcataattctcttactgtcatgccatccgtaagatgcttttctgtgactggtgagtactcaaccaagtcattctgagaatagtgtatgcggcgaccgagttgctcttgcccggcgtcaatacgggataataccgcgccacatagcagaactttaaaagtgctcatcattggaaaacgttcttcggggcgaaaactctcaaggatcttaccgctgttgagatccagttcgatgtaacccactcgtgcacccaactgatcttcagcatcttttactttcaccagcgtttctgggtgagcaaaaacaggaaggcaaaatgccgcaaaaaagggaataagggcgacacggaaatgttgaatactcatactcttcctttttcaatattattgaagcatttatcagggttattgtctcatgagcggatacatacgcgaggccatatgggttaactttgagccatcagaagcagagatctcctcagca
